(19) United States
(12) Patent Application Publication
(10) Pub. No.: US 2023/0183639 A1
(43) Pub. Date: Jun. 15, 2023

(54) IMPROVED MICROORGANISMS FOR ARABINOSE FERMENTATION

(71) Applicant: Novozymes A/S, Bagsvaerd (DK)

(72) Inventor: Monica Tassone, West Sacramento, CA (US)

(73) Assignee: Novozymes A/S, Bagsvaerd (DK)

(21) Appl. No.: 17/924,917

(22) PCT Filed: May 12, 2021
(86) PCT No.: PCT/US2021/032054

§ 371 Date: Nov. 11, 2022

Related U.S. Application Data
(60) Provisional application No. 63/024,010, filed on May 13, 2020.

(51) Int. Cl. C12N 1/18; C12N 15/52

(52) U.S. Cl. CPC C12N 1/185; C12N 15/52

(57) ABSTRACT

Described herein are recombinant host organisms having an active arabinose fermentation pathway and further comprising a heterologous polynucleotide a heterologous polynucleotide encoding a L-xylulose reductase (LXR). Also described are processes for 5 producing a fermentation product, such as ethanol, from starch or cellulosic-containing material with the recombinant host organisms.

### REFERENCE TO A SEQUENCE LISTING

[0001] This application contains a Sequence Listing in computer readable form, which is incorporated herein by reference.

### BACKGROUND

[0002] Production of ethanol from starch and cellulosic containing materials is well-known in the art.

[0003] The most commonly industrially used commercial process for starch-containing material, often referred to as a “conventional process”, includes liquefying gelatinized starch at high temperature (about 85° C.) using typically a bacterial alpha-amylase, followed by simultaneous saccharification and fermentation (SSF) carried out anaerobically in the presence of typically a glucoamylase and a Saccharomyces cerevisiae yeast.

[0004] Yeasts which are used for production of ethanol for use as fuel, such as in the corn ethanol industry, require several characteristics to ensure cost effective production of the ethanol. These characteristics include ethanol tolerance, low by-product yield, rapid fermentation, and the ability to limit the amount of residual sugars remaining in the ferment. Such characteristics have a marked effect on the viability of the industrial process.

[0005] Yeast of the genus Saccharomyces exhibits many of the characteristics required for production of ethanol. In particular, strains of Saccharomyces cerevisiae are widely used for the production of ethanol in the fuel ethanol industry. Strains of Saccharomyces cerevisiae that are widely used in the fuel ethanol industry have the ability to produce high yields of ethanol under fermentation conditions found in, for example, the fermentation of corn mash. An example of such a strain is the yeast used in commercially available ethanol yeast product called ETHANOL RED®.

[0006] Efforts to improve arabinose utilization by recombinant techniques to modify Saccharomyces yeast have been described in e.g., WO2002/066616, U.S. Pat. Nos. 9,551,015 and 7,977,083. However, there remains a need for improved arabinose sugar utilization in genetically-engineered yeast for production of bioethanol in an economically and commercially relevant scale.

### SUMMARY

[0007] Described herein are, inter alia, methods for producing a fermentation product, such as ethanol, from starch or cellulosic-containing material, and microorganisms suitable for use in such processes. The Applicant surprisingly found a cluster of related L-xylulose reductase (LXR) genes that, when expressed in a yeast host, can provide exceptional arabinose utilization. These related genes are structurally distinct from those LXRs used in the art, as described in more detail below, which the Applicant believes is responsible for their unexpected superior performance. The Applicant also found that yeast can utilize arabinose in a fungal arabinose pathway that expresses the described heterologous LXR gene together with a heterologous aldose reductase (AR) and L-arabinitol 4-dehydrogenase (LAD), but without the need for expressing other heterologous genes of the pathway (See FIG. 1).

[0008] A first aspect relates to a recombinant host cell having an active arabinose fermentation pathway, wherein the cell comprises:

[0009] (i) a heterologous polynucleotide encoding an aldose reductase (AR),

[0010] (ii) a heterologous polynucleotide encoding a L-arabinitol 4-dehydrogenase (LAD), and

[0011] (iii) a heterologous polynucleotide encoding a L-xylulose reductase (LXR);

[0012] wherein the L-xylulose reductase (LXR) has a mature polypeptide sequence with at least 60%, e.g., at least 65%, 70%, 75%, 80%, 85%, 90%, 95%, 97%, 98%, 99%, or 100% sequence identity to any one of SEQ ID NOs: 297, 300, 302 and 304.

[0013] In one embodiment, the L-xylulose reductase (LXR) differs by no more than ten amino acids, e.g., by no more than five amino acids, by no more than four amino acids, by no more than three amino acids, by no more than two amino acids, or by one amino acid from the amino acid sequence of any one of any one of SEQ ID NOs: 297, 300, 302 and 304. In one embodiment, the LXR comprises or consists of the amino acid sequence of any one of SEQ ID NOs: 297, 300, 302 and 304.

[0014] In one embodiment, the aldose reductase (AR) has a mature polypeptide sequence with at least 60%, e.g., at least 65%, 70%, 75%, 80%, 85%, 90%, 95%, 97%, 98%, 99%, or 100% sequence identity to any one of SEQ ID NOs: 281-285. In one embodiment, the AR differs by no more than ten amino acids, e.g., by no more than five amino acids, by no more than four amino acids, by no more than three amino acids, by no more than two amino acids, or by one amino acid from the amino acid sequence of any one of any one of SEQ ID NOs: 281-285. In one embodiment, the AR comprises or consists of the amino acid sequence of any one of SEQ ID NOs: 281-285.

[0015] In one embodiment, the L-arabinitol 4-dehydrogenase (LAD) has a mature polypeptide sequence with at least 60%, e.g., at least 65%, 70%, 75%, 80%, 85%, 90%, 95%, 97%, 98%, 99%, or 100% sequence identity to any one of SEQ ID NOs: 286-296. In one embodiment, the LAD differs by no more than ten amino acids, e.g., by no more than five amino acids, by no more than four amino acids, by no more than three amino acids, by no more than two amino acids, or by one amino acid from the amino acid sequence of any one of any one of SEQ ID NOs: 286-296. In one embodiment, the LAD comprises or consists of the amino acid sequence of any one of SEQ ID NOs: 286-296.

[0016] In some embodiments, the cell further comprises one or more heterologous polynucleotides selected from: (iv) a heterologous polynucleotide encoding a xylitol dehydrogenase (XDH); and (v) a heterologous polynucleotide encoding a xylulokinase (XK).

[0017] In one embodiment, the xylitol dehydrogenase (XDH) has a mature polypeptide sequence with at least 60%, e.g., at least 65%, 70%, 75%, 80%, 85%, 90%, 95%, 97%, 98%, 99%, or 100% sequence identity to SEQ ID NO: 309. In one embodiment, the XDH differs by no more than ten amino acids, e.g., by no more than five amino acids, by no more than four amino acids, by no more than three amino acids, by no more than two amino acids, or by one amino acid from the amino acid sequence of SEQ ID NO: 309. In one embodiment, the XDH comprises or consists of the amino acid sequence of SEQ ID NO: 309.

[0018] In one embodiment, the xylulokinase (XK) has a mature polypeptide sequence with at least 60%, e.g., at least 65%, 70%, 75%, 80%, 85%, 90%, 95%, 97%, 98%, 99%, or 100% sequence identity to SEQ ID NO: 75, SEQ ID NO: 310 or SEQ ID NO: 311. In one embodiment, the XK differs by no more than ten amino acids, e.g., by no more than five amino acids, by no more than four amino acids, by no more than three amino acids, by no more than two amino acids, or by one amino acid from the amino acid sequence of SEQ ID NO: 75, SEQ ID NO: 310 or SEQ ID NO: 311. In one embodiment, the XK comprises or consists of the amino acid sequence of SEQ ID NO: 75, SEQ ID NO: 310 or SEQ ID NO: 311.

[0019] In one embodiment, the heterologous polynucleotide of (i), (ii), (iii), (iv) and/or (v) is operably linked to a promoter that is foreign to the polynucleotide.

[0020] In one embodiment, the cell further comprises heterologous polynucleotide encoding a non-phosphorylating NADP-dependent glyceraldehyde-3-phosphate dehydrogenase (GAPN). In one embodiment, the GAPN has a mature polypeptide sequence with at least 60%, e.g., at least 65%, 70%, 75%, 80%, 85%, 90%, 95%, 97%, 98%, 99%, or 100% sequence identity to any one of SEQ ID NOs: 262-280. In one embodiment, the GAPN differs by no more than ten amino acids, e.g., by no more than five amino acids, by no more than four amino acids, by no more than three amino acids, by no more than two amino acids, or by one amino acid from the amino acid sequence of any one of SEQ ID NOs: 262-280. In one embodiment, the GAPN comprises or consists of the amino acid sequence of any one of SEQ ID NOs: 262-280. In one embodiment, the heterologous polynucleotide encoding the GAPN is operably linked to a promoter that is foreign to the polynucleotide.

[0021] In one embodiment, the recombinant host cell comprises an active xylose fermentation pathway. In one embodiment, the cell comprises one or more active xylose fermentation pathway genes selected from: a heterologous polynucleotide encoding a xylose isomerase (XI), and a heterologous polynucleotide encoding a xylulokinase (XK). In one embodiment, the cell comprises one or more active xylose fermentation pathway genes selected from: a heterologous polynucleotide encoding an aldose reductase (AR), a heterologous polynucleotide encoding a xylitol dehydrogenase (XDH), and a heterologous polynucleotide encoding a xylulokinase (XK).

[0022] In one embodiment, the recombinant host cell further comprises a heterologous polynucleotide encoding a glucoamylase. In one embodiment, the glucoamylase has a mature polypeptide sequence with at least 60%, e.g., at least 65%, 70%, 75%, 80%, 85%, 90%, 95%, 97%, 98%, 99%, or 100% sequence identity the amino acid sequence of any one of SEQ ID NOs: 8,102-113,229,230 and 244-250. In one embodiment, the heterologous polynucleotide encoding the glucoamylase is operably linked to a promoter that is foreign to the polynucleotide.

[0023] In one embodiment, the recombinant host cell further comprises a heterologous polynucleotide encoding an alpha-amylase. In one embodiment, the alpha-amylase has a mature polypeptide sequence with at least 60%, e.g., at least 65%, 70%, 75%, 80%, 85%, 90%, 95%, 97%, 98%, 99%, or 100% sequence identity the amino acid sequence of any one of SEQ ID NOs: 76-101, 121-174, 231 and 251-256. In one embodiment, the heterologous polynucleotide encoding the alpha-amylase is operably linked to a promoter that is foreign to the polynucleotide.

[0024] In one embodiment, the recombinant host cell further comprises a heterologous polynucleotide encoding a phospholipase. In one embodiment, the phospholipase has a mature polypeptide sequence with at least 60%, e.g., at least 65%, 70%, 75%, 80%, 85%, 90%, 95%, 97%, 98%, 99%, or 100% sequence identity the amino acid sequence of any one of SEQ ID NOs: 235, 236, 237, 238, 239, 240, 241 and 242. In one embodiment, the heterologous polynucleotide encoding phospholipase is operably linked to a promoter that is foreign to the polynucleotide.

[0025] In one embodiment, the recombinant host cell further comprises a heterologous polynucleotide encoding a trehalase. In one embodiment, the trehalase has a mature polypeptide sequence with at least 60%, e.g., at least 65%, 70%, 75%, 80%, 85%, 90%, 95%, 97%, 98%, 99%, or 100% sequence identity the amino acid sequence of any one of SEQ ID NOs: 175-226. In one embodiment, the heterologous polynucleotide encoding the trehalase is operably linked to a promoter that is foreign to the polynucleotide.

[0026] In one embodiment, the recombinant host cell further comprises a heterologous polynucleotide encoding a protease. In one embodiment, the protease has a mature polypeptide sequence with at least 60%, e.g., at least 65%, 70%, 75%, 80%, 85%, 90%, 95%, 97%, 98%, 99%, or 100% sequence identity the amino acid sequence of any one of SEQ ID NOs: 9-73. In one embodiment, the heterologous polynucleotide encoding the protease is operably linked to a promoter that is foreign to the polynucleotide.

[0027] In one embodiment, the recombinant host cell further comprises a heterologous polynucleotide encoding a pullulanase. In one embodiment, the pullulanase has a mature polypeptide sequence with at least 60%, e.g., at least 65%, 70%, 75%, 80%, 85%, 90%, 95%, 97%, 98%, 99%, or 100% sequence identity the amino acid sequence of any one of SEQ ID NOs: 114-120. In one embodiment, the heterologous polynucleotide encoding the pullulanase is operably linked to a promoter that is foreign to the polynucleotide.

[0028] In one embodiment, the recombinant host cell is capable of higher anaerobic growth rate on pentose (e.g., xylose and/or arabinose) compared to the same cell without the heterologous polynucleotide encoding a L-xylulose reductase (LXR) (e.g., under conditions described in Example 2). In one embodiment, the cell is capable of higher anaerobic growth rate on pentose (e.g., xylose and/or arabinose) compared to the same cell encoding the L-xylulose reductase (LXR) of SEQ ID NO: 305 (e.g., under conditions described in Example 2).

[0029] In one embodiment, the recombinant host cell is capable of a higher rate of pentose consumption (e.g., at least 5%, 10%, 15%, 20%, 25%, 30%, 35%, 40%, 45%, 50%, 60%, 75% or 90% higher xylose and/or arabinose consumption) compared to the same cell without the heterologous polynucleotide encoding a L-xylulose reductase (LXR) (e.g., under conditions described in Example 2). In one embodiment, the recombinant host cell is capable of a higher rate of pentose consumption (e.g., at least 5%, 10%, 15%, 20%, 25%, 30%, 35%, 40%, 45%, 50%, 60%, 75% or 90% higher xylose and/or arabinose consumption) compared to the same cell encoding the L-xylulose reductase (LXR) of SEQ ID NO: 305 (e.g., under conditions described in Example 2).

[0030] In one embodiment, the recombinant host cell is capable of higher pentose consumption (e.g., xylose and/or arabinose) compared to the same cell without the heterologous polynucleotide encoding a L-xylulose reductase (LXR) at about or after 120 hours fermentation (e.g., under conditions described in Example 2). In one embodiment, the recombinant host cell is capable of higher pentose consumption (e.g., xylose and/or arabinose) compared to the same cell encoding the L-xylulose reductase (LXR) of SEQ ID NO: 305 at about or after 120 hours fermentation (e.g., under conditions described in Example 2). In one embodiment, the recombinant host cell is capable of consuming more than 65%, e.g., at least 70%, 75%, 80%, 85%, 90%, 95% of pentose (e.g., xylose and/or arabinose) in the medium at about or after 120 hours fermentation (e.g., under conditions described in Example 2).

[0031] In one embodiment, the recombinant host cell is capable of higher ethanol production compared to the same cell without the heterologous polynucleotide of (i), (ii), (iii), (iv) and/or (v) under the same conditions (e.g., after 40 hours of fermentation). In one embodiment, the recombinant host cell is capable of higher ethanol production compared to the same cell encoding the L-xylulose reductase (LXR) of SEQ ID NO: 305 under the same conditions (e.g., after 40 hours of fermentation).

[0032] In one embodiment, the recombinant host cell further comprises a heterologous polynucleotide encoding a transketolase (TKL1). In one embodiment, the cell further comprises a heterologous polynucleotide encoding a transaldolase (TAL1).

[0033] In one embodiment, the recombinant host cell further comprises a disruption (e.g., inactivation) to an endogenous gene encoding a glycerol 3-phosphate dehydrogenase (GPD). In one embodiment, the cell further comprises a disruption (e.g., inactivation) to an endogenous gene encoding a glycerol 3-phosphatase (GPP). In one embodiment, the cell produces a decreased amount of glycerol (e.g., at least 25% less, at least 50% less, at least 60% less, at least 70% less, at least 80% less, or at least 90% less) compared to the cell without the disruption to the endogenous gene encoding the GPD and/or GPP when cultivated under identical conditions.

[0034] In one embodiment, the recombinant host cell is a yeast cell. In one embodiment, the cell is a Saccharomyces, Rhodotorula, Schizosaccharomyces, Kluyveromyces, Pichia, Hansenula, Rhodosporidium, Candida, Yarrowia, Lipomyces, Cryptococcus, or Dekkera sp. yeast cell. In one embodiment, the cell is Saccharomyces cerevisiae.

[0035] A second aspect relates to methods of producing a fermentation product from a starch-containing or cellulosic-containing material, the method comprising:

[0036] (a) saccharifying the starch-containing or cellulosic-containing material; and

[0037] (b) fermenting the saccharified material of step (a) with the recombinant host cell of the first aspect.

[0038] In one embodiment, the method comprises liquefying the starch-containing material at a temperature above the initial gelatinization temperature in the presence of an alpha-amylase and/or a protease prior to saccharification. In one embodiment, the fermentation product is ethanol.

[0039] A third aspect relates to methods of producing a derivative of host cell of the first aspect, comprising culturing a host cell of the first aspect with a second host cell under conditions which permit combining of DNA between the first and second host cells, and screening or selecting for a derived host cell.

[0040] A fourth aspect relates to compositions comprising the host cell of the first aspect with one or more naturally occurring and/or non-naturally occurring components, such as components selected from the group consisting of: surfactants, emulsifiers, gums, swelling agents, and antioxidants.

### BRIEF DESCRIPTION OF THE FIGURES

[0041] FIG. 1 shows arabinose fermentation pathways from L-arabinose to D-xylulose 5-phosphate, which is then fermented to ethanol via the pentose phosphate pathway. The bacterial pathway utilizes genes L-arabinose isomerase (AI), L-ribulokinase (RK), and L-ribulose-5-P4-epimerase (R5PE) to convert L-arabinose to D-xylulose 5-phosphate. The fungal pathway proceeds using aldose reductase (AR), L-arabinitol 4-dehydrogenase (LAD), L-xylulose reductase (LXR), xylitol dehydrogenase (XDH) and xylulokinase (XK).

[0042] FIG. 2 shows a functional diversity tree for the expressed heterologous L-xylulose reductases (LXRs). The cluster of LXRs that provided substantial cell growth on arabinose agar plates is indicated with a box. The remaining LXRs provided minimal or no cell growth under the same conditions, including the previously described T. reesei LXR of SEQ ID NO: 305 (shown with an asterisk).

[0043] FIG. 3 shows a Multiple Sequence Alighnment of the L-xylulose reductases (LXRs) of SEQ ID NOs: 297, 300, 302 and 304.

[0044] FIG. 4 shows xylose fermentation pathways from D-xylose to D-xylulose 5-phosphate, which is then fermented to ethanol via the pentose phosphate pathway. The oxido-reductase pathway uses an aldolase reductase (AR, such as xylose reductase (XR)) to reduce D-xylose to xylitol followed by oxidation of xylitol to D-xylulose with xylitol dehydrogenase (XDH). The isomerase pathway uses xylose isomerase (XI) to convert D-xylose directly into D-xylulose. D-xylulose is then converted to D-xylulose-5-phosphate with xylulokinase (XK).

[0045] FIG. 5 shows a plasmid map of pMLBA635.

[0046] FIG. 6 shows a plasmid map of pMLBA638.

### DEFINITIONS

[0047] Unless defined otherwise or clearly indicated by context, all technical and scientific terms used herein have the same meaning as commonly understood by one of ordinary skill in the art.

[0048] Aldose reductase: The term “aldose reductase” or “AR” is classified as E.C. 1.1.1.21 and means an enzyme that catalyzes the conversion of L-arabinose to L-arabitol. Some aldose reductase genes may be unspecific and have activity on D-xylose to produce xylitol (AKA, D-xylose reductase; classified as E.C. 1.1.1.307). Aldose reductase activity can be determined using methods known in the art (e.g., Kuhn, et al., 1995, Appl. Environ. Microbiol. 61 (4), 1580-1585).

[0049] Allelic variant: The term “allelic variant” means any of two or more alternative forms of a gene occupying the same chromosomal locus. Allelic variation arises naturally through mutation, and may result in polymorphism within populations. Gene mutations can be silent (no change in the encoded polypeptide) or may encode polypeptides having altered amino acid sequences. An allelic variant of a polypeptide is a polypeptide encoded by an allelic variant of a gene.

[0050] Alpha-amylase: The term “alpha amylase” means an 1,4-alpha-D-glucan glucanohydrolase, EC. 3.2.1.1, which catalyze hydrolysis of starch and other linear and branched 1,4-glucosidic oligo- and polysaccharides. Alpha-amylase activity can be determined using methods known in the art (e.g., using an alpha amylase assay described WO02020/023411).

[0051] L-arabinitol dehydrogenase: The term “L-arabinitol dehydrogenase” or “LAD” is classified as E.C. 1.1.1.12 and means an enzyme that catalyzes the conversion of L-arabitol to L-xylulose. L-arabinitol dehydrogenase activity can be determined using methods known in the art (e.g., as described in U.S. Pat. No. 7,527,951).

[0052] Auxiliary Activity 9: The term “Auxiliary Activity 9” or “AA9” means a polypeptide classified as a lytic polysaccharide monooxygenase (Quinlan et al., 2011, Proc. Natl. Acad. Sci. USA 208: 15079-15084; Phillips et al., 2011, ACS Chem. Biol. 6: 1399-1406; Lin et al., 2012, Structure 20: 1051-1061). AA9 polypeptides were formerly classified into the glycoside hydrolase Family 61 (GH61) according to Henrissat, 1991, Biochem. J. 280: 309-316, and Henrissat and Bairoch, 1996, Biochem. J. 316: 695-696.

[0053] AA9 polypeptides enhance the hydrolysis of a cellulosic-containing material by an enzyme having cellulolytic activity. Cellulolytic enhancing activity can be determined by measuring the increase in reducing sugars or the increase of the total of cellobiose and glucose from the hydrolysis of a cellulosic-containing material by cellulolytic enzyme under the following conditions: 1-50 mg of total protein/g of cellulose in pretreated corn stover (PCS), wherein total protein is comprised of 50-99.5% w/w cellulolytic enzyme protein and 0.5-50% w/w protein of an AA9 polypeptide for 1-7 days at a suitable temperature, such as 40 C-80° C., e.g., 50° C., 55° C., 60° C., 65° C., or 70° C., and a suitable pH, such as 4-9, e.g., 4.5, 5.0, 5.5, 6.0, 6.5, 7.0, 7.5, 8.0, or 8.5, compared to a control hydrolysis with equal total protein loading without cellulolytic enhancing activity (1-50 mg of cellulolytic protein/g of cellulose in PCS).

[0054] AA9 polypeptide enhancing activity can be determined using a mixture of CELLUCLAST® 1.5 L (Novozymes A/S, Bagsværd, Denmark) and beta-glucosidase as the source of the cellulolytic activity, wherein the beta-glucosidase is present at a weight of at least 2-5% protein of the cellulase protein loading. In one embodiment, the beta-glucosidase is an Aspergillus oryzae beta-glucosidase (e.g., recombinantly produced in Aspergillus oryzae according to WO 02/095014). In another embodiment, the beta-glucosidase is an Aspergillus fumigatus beta-glucosidase (e.g., recombinantly produced in Aspergillus oryzae as described in WO 02/095014).

[0055] AA9 polypeptide enhancing activity can also be determined by incubating an AA9 polypeptide with 0.5% phosphoric acid swollen cellulose (PASC), 100 mM sodium acetate pH 5, 1 mM MnSO₄, 0.1% gallic acid, 0.025 mg/ml of Aspergillus fumigatus beta-glucosidase, and 0.01% TRITON® X-100 (4-(1,1,3,3-tetramethylbutyl)phenyl-polyethylene glycol) for 24-96 hours at 40° C. followed by determination of the glucose released from the PASC.

[0056] AA9 polypeptide enhancing activity can also be determined according to WO02013/028928 for high temperature compositions.

[0057] AA9 polypeptides enhance the hydrolysis of a cellulosic-containing material catalyzed by enzyme having cellulolytic activity by reducing the amount of cellulolytic enzyme required to reach the same degree of hydrolysis preferably at least 1.01-fold, e.g., at least 1.05-fold, at least 1.10-fold, at least 1.25-fold, at least 1.5-fold, at least 2-fold, at least 3-fold, at least 4-fold, at least 5-fold, at least 10-fold, or at least 20-fold.

[0058] Beta-glucosidase: The term “beta-glucosidase” means a beta-D-glucoside glucohydrolase (E.C. 3.2.1.21) that catalyzes the hydrolysis of terminal non-reducing beta-D-glucose residues with the release of beta-D-glucose. Beta-glucosidase activity can be determined using p-nitrophenyl-beta-D-glucopyranoside as substrate according to the procedure of Venturi et al., 2002, J. Basic Microbiol. 42: 55-66. One unit of beta-glucosidase is defined as 1.0 μmole of p-nitrophenolate anion produced per minute at 25° C., pH 4.8 from 1 mM p-nitrophenyl-beta-D-glucopyranoside as substrate in 50 mM sodium citrate containing 0.01% TWEEN®20.

[0059] Beta-xylosidase: The term “beta-xylosidase” means a beta-D-xyloside xylohydrolase (E.C. 3.2.1.37) that catalyzes the exo-hydrolysis of short beta (1→4)-xylooligosaccharides to remove successive D-xylose residues from non-reducing termini. Beta-xylosidase activity can be determined using 1 mM p-nitrophenyl-beta-D-xyloside as substrate in 100 mM sodium citrate containing 0.01% TWEEN® 20 at pH 5, 40° C. One unit of beta-xylosidase is defined as 1.0 μmole of p-nitrophenolate anion produced per minute at 40° C., pH 5 from 1 mM p-nitrophenyl-beta-D-xyloside in 100 mM sodium citrate containing 0.01% TWEEN®20.

[0060] Catalase: The term “catalase” means a hydrogen-peroxide:hydrogen-peroxide oxidoreductase (EC 1.11.1.6) that catalyzes the conversion of 2H₂O₂ to O₂+2 H₂O. For purposes of the present invention, catalase activity is determined according to U.S. Pat. No. 5,646,025. One unit of catalase activity equals the amount of enzyme that catalyzes the oxidation of 1 μmole of hydrogen peroxide under the assay conditions.

[0061] Catalytic domain: The term “catalytic domain” means the region of an enzyme containing the catalytic machinery of the enzyme.

[0062] Cellobiohydrolase: The term “cellobiohydrolase” means a 1,4-beta-D-glucan cellobiohydrolase (E.C. 3.2.1.91 and E.C. 3.2.1.176) that catalyzes the hydrolysis of 1,4-beta-D-glucosidic linkages in cellulose, cellooligosaccharides, or any beta-1,4-linked glucose containing polymer, releasing cellobiose from the reducing end (cellobiohydrolase 1) or non-reducing end (cellobiohydrolase 11) of the chain (Teeri, 1997, Trends in Biotechnology 15: 160-167; Teeri et al., 1998, Biochem. Soc. Trans. 26: 173-178). Cellobiohydrolase activity can be determined according to the procedures described by Lever et al., 1972, Anal. Biochem. 47: 273-279; van Tilbeurgh et al., 1982, FEBS Letters 149: 152-156; van Tilbeurgh and Claeyssens, 1985, FEBS Letters 187: 283-288; and Tomme et al., 1988, Eur. J. Biochem. 170: 575-581.

[0063] Cellulolytic enzyme or cellulase: The term “cellulolytic enzyme” or “cellulase” means one or more (e.g., several) enzymes that hydrolyze a cellulosic-containing material. Such enzymes include endoglucanase(s), cellobiohydrolase(s), beta-glucosidase(s), or combinations thereof. The two basic approaches for measuring cellulolytic enzyme activity include: (1) measuring the total cellulolytic enzyme activity, and (2) measuring the individual cellulolytic enzyme activities (endoglucanases, cellobiohydrolases, and beta-glucosidases) as reviewed in Zhang et al., 2006, Biotechnology Advances 24: 452-481. Total cellulolytic enzyme activity can be measured using insoluble substrates, including Whatman N1 filter paper, microcrystalline cellulose, bacterial cellulose, algal cellulose, cotton, pretreated lignocellulose, etc. The most common total cellulolytic activity assay is the filter paper assay using Whatman No 1 filter paper as the substrate. The assay was established by the International Union of Pure and Applied Chemistry (IUPAC) (Ghose, 1987, Pure Appl. Chem. 59:257-68).

[0064] Cellulolytic enzyme activity can be determined by measuring the increase in production/release of sugars during hydrolysis of a cellulosic-containing material by cellulolytic enzyme(s) under the following conditions: 1-50 mg of cellulolytic enzyme protein/g of cellulose in pretreated corn stover (PCS) (or other pretreated cellulosic-containing material) for 3-7 days at a suitable temperature such as 40° C.-80° C., e.g., 50° C., 55° C., 60° C., 65° C., or 70° C., and a suitable pH such as 4-9, e.g., 5.0, 5.5, 6.0, 6.5, or 7.0, compared to a control hydrolysis without addition of cellulolytic enzyme protein. Typical conditions are 1 ml reactions, washed or unwashed PCS, 5% insoluble solids (dry weight), 50 mM sodium acetate pH 5, 1 mM MnSO₄, 50° C., 55° C., or 60° C., 72 hours, sugar analysis by AMINEX® HPX-87H column chromatography (Bio-Rad Laboratories, Inc., Hercules, Calif., USA).

[0065] Coding sequence: The term “coding sequence” or “coding region” means a polynucleotide sequence, which specifies the amino acid sequence of a polypeptide. The boundaries of the coding sequence are generally determined by an open reading frame, which usually begins with the ATG start codon or alternative start codons such as GTG and TTG and ends with a stop codon such as TAA, TAG, and TGA. The coding sequence may be a sequence of genomic DNA, cDNA, a synthetic polynucleotide, and/or a recombinant polynucleotide.

[0066] Control sequence: The term “control sequence” means a nucleic acid sequence necessary for polypeptide expression. Control sequences may be native or foreign to the polynucleotide encoding the polypeptide, and native or foreign to each other. Such control sequences include, but are not limited to, a leader sequence, polyadenylation sequence, propeptide sequence, promoter sequence, signal peptide sequence, and transcription terminator sequence. The control sequences may be provided with linkers for the purpose of introducing specific restriction sites facilitating ligation of the control sequences with the coding region of the polynucleotide encoding a polypeptide.

[0067] Disruption: The term “disruption” means that a coding region and/or control sequence of a referenced gene is partially or entirely modified (such as by deletion, insertion, and/or substitution of one or more nucleotides) resulting in the absence (inactivation) or decrease in expression, and/or the absence or decrease of enzyme activity of the encoded polypeptide. The effects of disruption can be measured using techniques known in the art such as detecting the absence or decrease of enzyme activity using from cell-free extract measurements referenced herein; or by the absence or decrease of corresponding mRNA (e.g., at least 25% decrease, at least 50% decrease, at least 60% decrease, at least 70% decrease, at least 80% decrease, or at least 90% decrease); the absence or decrease in the amount of corresponding polypeptide having enzyme activity (e.g., at least 25% decrease, at least 50% decrease, at least 60% decrease, at least 70% decrease, at least 80% decrease, or at least 90% decrease); or the absence or decrease of the specific activity of the corresponding polypeptide having enzyme activity (e.g., at least 25% decrease, at least 50% decrease, at least 60% decrease, at least 70% decrease, at least 80% decrease, or at least 90% decrease). Disruptions of a particular gene of interest can be generated by methods known in the art, e.g., by directed homologous recombination (see Methods in Yeast Genetics (1997 edition), Adams, Gottschling, Kaiser, and Stems, Cold Spring Harbor Press (1998)).

[0068] Endogenous gene: The term “endogenous gene” means a gene that is native to the referenced host cell. “Endogenous gene expression” means expression of an endogenous gene.

[0069] Endoglucanase: The term “endoglucanase” means a 4-(1,3;1,4)-beta-D-glucan 4-glucanohydrolase (E.C. 3.2.1.4) that catalyzes endohydrolysis of 1,4-beta-D-glycosidic linkages in cellulose, cellulose derivatives (such as carboxymethyl cellulose and hydroxyethyl cellulose), lichenin, beta-1,4 bonds in mixed beta-1,3-1,4 glucans such as cereal beta-D-glucans or xyloglucans, and other plant material containing cellulosic components. Endoglucanase activity can be determined by measuring reduction in substrate viscosity or increase in reducing ends determined by a reducing sugar assay (Zhang et al., 2006, Biotechnology Advances 24: 452-481). Endoglucanase activity can also be determined using carboxymethyl cellulose (CMC) as substrate according to the procedure of Ghose, 1987, Pure and Appl. Chem. 59:257-268, at pH 5, 40° C.

[0070] Expression: The term “expression” includes any step involved in the production of the polypeptide including, but not limited to, transcription, post-transcriptional modification, translation, post-translational modification, and secretion. Expression can be measured—for example, to detect increased expression—by techniques known in the art, such as measuring levels of mRNA and/or translated polypeptide.

[0071] Expression vector: The term “expression vector” means a linear or circular DNA molecule that comprises a polynucleotide encoding a polypeptide and is operably linked to control sequences that provide for its expression.

[0072] Fermentable medium: The term “fermentable medium” or “fermentation medium” refers to a medium comprising one or more (e.g., two, several) sugars, such as glucose, fructose, sucrose, cellobiose, xylose, xylulose, arabinose, mannose, galactose, and/or soluble oligosaccharides, wherein the medium is capable, in part, of being converted (fermented) by a host cell into a desired product, such as ethanol. In some instances, the fermentation medium is derived from a natural source, such as sugar cane, starch, or cellulose, and may be the result of pretreating the source by enzymatic hydrolysis (saccharification). The term fermentation medium is understood herein to refer to a medium before the fermenting organism is added, such as, a medium resulting from a saccharification process, as well as a medium used in a simultaneous saccharification and fermentation process (SSF).

[0073] Glucoamylase: The term “glucoamylase” (1,4-alpha-D-glucan glucohydrolase, EC 3.2.1.3) is defined as an enzyme that catalyzes the release of D-glucose from the non-reducing ends of starch or related oligo- and polysaccharide molecules. For purposes of the present invention, glucoamylase activity may be determined according to the procedures known in the art, such as those described in WO02020/023411.

[0074] Hemicellulolytic enzyme or hemicellulase: The term “hemicellulolytic enzyme” or “hemicellulase” means one or more (e.g., several) enzymes that hydrolyze a hemicellulosic material. See, for example, Shallom and Shoham, 2003, Current Opinion In Microbiology 6(3): 219-228). Hemicellulases are key components in the degradation of plant biomass. Examples of hemicellulases include, but are not limited to, an acetylmannan esterase, an acetylxylan esterase, an arabinanase, an arabinofuranosidase, a coumaric acid esterase, a feruloyl esterase, a galactosidase, a glucuronidase, a glucuronoyl esterase, a mannanase, a mannosidase, a xylanase, and a xylosidase. The substrates for these enzymes, hemicelluloses, are a heterogeneous group of branched and linear polysaccharides that are bound via hydrogen bonds to the cellulose microfibrils in the plant cell wall, crosslinking them into a robust network. Hemicelluloses are also covalently attached to lignin, forming together with cellulose a highly complex structure. The variable structure and organization of hemicelluloses require the concerted action of many enzymes for its complete degradation. The catalytic modules of hemicellulases are either glycoside hydrolases (GHs) that hydrolyze glycosidic bonds, or carbohydrate esterases (CEs), which hydrolyze ester linkages of acetate or ferulic acid side groups. These catalytic modules, based on homology of their primary sequence, can be assigned into GH and CE families. Some families, with an overall similar fold, can be further grouped into clans, marked alphabetically (e.g., GH-A). A most informative and updated classification of these and other carbohydrate active enzymes is available in the Carbohydrate-Active Enzymes (CAZy) database. Hemicellulolytic enzyme activities can be measured according to Ghose and Bisaria, 1987, Pure & Appl. Chem. 59: 1739-1752, at a suitable temperature such as 40° C.-80° C., e.g., 50° C., 55° C., 60° C., 65° C., or 70° C., and a suitable pH such as 4-9, e.g., 5.0, 5.5, 6.0, 6.5, or 7.0.

[0075] Heterologous polynucleotide: The term “heterologous polynucleotide” is defined herein as a polynucleotide that is not native to the host cell; a native polynucleotide in which structural modifications have been made to the coding region; a native polynucleotide whose expression is quantitatively altered as a result of a manipulation of the DNA by recombinant DNA techniques, e.g., a different (foreign) promoter; or a native polynucleotide in a host cell having one or more extra copies of the polynucleotide to quantitatively alter expression. A “heterologous gene” is a gene comprising a heterologous polynucleotide.

[0076] High stringency conditions: The term “high stringency conditions” means for probes of at least 100 nucleotides in length, prehybridization and hybridization at 42° C. in 5×SSPE, 0.3% SDS, 200 micrograms/ml sheared and denatured salmon sperm DNA, and 50% formamide, following standard Southern blotting procedures for 12 to 24 hours. The carrier material is finally washed three times each for 15 minutes using 0.2×SSC, 0.2% SDS at 65° C.

[0077] Host cell: The term “host cell” means any cell type that is susceptible to transformation, transfection, transduction, and the like with a nucleic acid construct or expression vector comprising a polynucleotide described herein. The term “host cell” encompasses any progeny of a parent cell that is not identical to the parent cell due to mutations that occur during replication. The term “recombinant cell” is defined herein as a non-naturally occurring host cell comprising one or more (e.g., two, several) heterologous polynucleotides.

[0078] Low stringency conditions: The term “low stringency conditions” means for probes of at least 100 nucleotides in length, prehybridization and hybridization at 42° C. in 5×SSPE, 0.3% SDS, 200 micrograms/ml sheared and denatured salmon sperm DNA, and 25% formamide, following standard Southern blotting procedures for 12 to 24 hours. The carrier material is finally washed three times each for 15 minutes using 0.2×SSC, 0.2% SDS at 50° C.

[0079] Mature polypeptide: The term “mature polypeptide” is defined herein as a polypeptide having biological activity that is in its final form following translation and any post-translational modifications, such as N-terminal processing, C-terminal truncation, glycosylation, phosphorylation, etc. The mature polypeptide sequence lacks a signal sequence, which may be determined using techniques known in the art (See, e.g., Zhang and Henzel, 2004, Protein Science 13: 2819-2824). The term “mature polypeptide coding sequence” means a polynucleotide that encodes a mature polypeptide.

[0080] Medium stringency conditions: The term “medium stringency conditions” means for probes of at least 100 nucleotides in length, prehybridization and hybridization at 42° C. in 5×SSPE, 0.3% SDS, 200 micrograms/ml sheared and denatured salmon sperm DNA, and 35% formamide, following standard Southern blotting procedures for 12 to 24 hours. The carrier material is finally washed three times each for 15 minutes using 0.2×SSC, 0.2% SDS at 55° C.

[0081] Medium-high stringency conditions: The term “medium-high stringency conditions” means for probes of at least 100 nucleotides in length, prehybridization and hybridization at 42° C. in 5×SSPE, 0.3% SDS, 200 micrograms/ml sheared and denatured salmon sperm DNA, and 35% formamide, following standard Southern blotting procedures for 12 to 24 hours. The carrier material is finally washed three times each for 15 minutes using 0.2×SSC, 0.2% SDS at 60° C.

[0082] Non-phosphorylating NADP-dependent glyceraldehyde-3-phosphate dehydrogenase (GAPN): The term “non-phosphorylating NADP-dependent glyceraldehyde-3-phosphate dehydrogenase”, “NADP-dependent glyceraldehyde-3-phosphate dehydrogenase” or “GAPN” is defined herein as an enzyme that catalyzes the chemical reaction of glyceraldehyde-3-phosphate and NADP+ to 3-phosphoglycerate and NADPH (e.g., EC 1.2.1.9). GAPN activity may be determined from cell-free extracts as described in the art, e.g., as described in Tamoi et al., 1996, Biochem. J. 316, 685-690. For example, GAPN activity may be measured spectrophotometrically by monitoring the absorbance change following NADPH oxidation at 340 nm in a reaction mixture containing 100 mM Tris/HCl buffer (pH 8.0), 10 mM MgCl₂, 10 mM GSH, 5 mM ATP, 0.2 mM NADPH, 2 units of 3-phosphoglyceric phosphokinase, 2 mM 3-phosphoglyceric acid and the enzyme.

[0083] Nucleic acid construct: The term “nucleic acid construct” means a polynucleotide comprises one or more (e.g., two, several) control sequences. The polynucleotide may be single-stranded or double-stranded, and may be isolated from a naturally occurring gene, modified to contain segments of nucleic acids in a manner that would not otherwise exist in nature, or synthetic.

[0084] Operably linked: The term “operably linked” means a configuration in which a control sequence is placed at an appropriate position relative to the coding sequence of a polynucleotide such that the control sequence directs expression of the coding sequence.

[0085] Pentose: The term “pentose” means a five-carbon monosaccharide (e.g., xylose, arabinose, ribose, lyxose, ribulose, and xylulose). Pentoses, such as D-xylose and L-arabinose, may be derived, e.g., through saccharification of a plant cell wall polysaccharide.

[0086] Active pentose fermentation pathway: As used herein, a host cell or fermenting organism having an “active pentose fermentation pathway” produces active enzymes necessary to catalyze each reaction of a metabolic pathway in a sufficient amount to produce a fermentation product (e.g., ethanol) from pentose, and therefore is capable of producing the fermentation product in measurable yields when cultivated under fermentation conditions in the presence of pentose. A host cell or fermenting organism having an active pentose fermentation pathway comprises one or more active pentose fermentation pathway genes. A “pentose fermentation pathway gene” as used herein refers to a gene that encodes an enzyme involved in an active pentose fermentation pathway. In some embodiments, the active pentose fermentation pathway is an “active xylose fermentation pathway” (ie produces a fermentation product, such as ethanol, from xylose) or an “active arabinose fermentation pathway (ie produces a fermentation product, such as ethanol, from arabinose).

[0087] The active enzymes necessary to catalyze each reaction in an active pentose fermentation pathway may result from activities of endogenous gene expression, activities of heterologous gene expression, or from a combination of activities of endogenous and heterologous gene expression, as described in more detail herein.

[0088] Phospholipase: The term “phospholipase” means an enzyme that catalyzes the conversion of phospholipids into fatty acids and other lipophilic substances, such as phospholipase A (EC numbers 3.1.1.4, 3.1.1.5 and 3.1.1.32) or phospholipase C (EC numbers 3.1.4.3 and 3.1.4.11). Phospholipase activity may be determined using activity assays known in the art.

[0089] Pretreated corn stover: The term “Pretreated Corn Stover” or “PCS” means a cellulosic-containing material derived from corn stover by treatment with heat and dilute sulfuric acid, alkaline pretreatment, neutral pretreatment, or any pretreatment known in the art.

[0090] Protease: The term “protease” is defined herein as an enzyme that hydrolyses peptide bonds. It includes any enzyme belonging to the EC 3.4 enzyme group (including each of the thirteen subclasses thereof). The EC number refers to Enzyme Nomenclature 1992 from NC-IUBMB, Academic Press, San Diego, Calif., including supplements 1-5 published in Eur. J. Biochem. 223: 1-5 (1994); Eur. J. Biochem. 232: 1-6 (1995); Eur. J. Biochem. 237: 1-5 (1996); Eur. J. Biochem. 250: 1-6 (1997); and Eur. J. Biochem. 264: 610-650 (1999); respectively. The term “subtilases” refer to a sub-group of serine protease according to Siezen et al., 1991, Protein Engng. 4: 719-737 and Siezen et al., 1997, Protein Science 6: 501-523. Serine proteases or serine peptidases is a subgroup of proteases characterised by having a serine in the active site, which forms a covalent adduct with the substrate. Further the subtilases (and the serine proteases) are characterised by having two active site amino acid residues apart from the serine, namely a histidine and an aspartic acid residue. The subtilases may be divided into 6 sub-divisions, i.e. the Subtilisin family, the Thermitase family, the Proteinase K family, the Lantibiotic peptidase family, the Kexin family and the Pyrolysin family. The term “protease activity” means a proteolytic activity (EC 3.4). Protease activity may be determined using methods described in the art (e.g., US 2015/0125925) or using commercially available assay kits (e.g., Sigma-Aldrich).

[0091] Pullulanase: The term “pullulanase” means a starch debranching enzyme having pullulan 6-glucano-hydrolase activity (EC 3.2.1.41) that catalyzes the hydrolysis the α-1,6-glycosidic bonds in pullulan, releasing maltotriose with reducing carbohydrate ends. For purposes of the present invention, pullulanase activity can be determined according to a PHADEBAS assay or the sweet potato starch assay described in WO2016/087237.

[0092] Sequence Identity: The relatedness between two amino acid sequences or between two nucleotide sequences is described by the parameter “sequence identity”.

[0093] For purposes described herein, the degree of sequence identity between two amino acid sequences is determined using the Needleman-Wunsch algorithm (Needleman and Wunsch, J. Mol. Biol. 1970, 48, 443-453) as implemented in the Needle program of the EMBOSS package (EMBOSS: The European Molecular Biology Open Software Suite, Rice et al., Trends Genet 2000, 16, 276-277), preferably version 3.0.0 or later. The optional parameters used are gap open penalty of 10, gap extension penalty of 0.5, and the EBLOSUM62 (EMBOSS version of BLOSUM62) substitution matrix. The output of Needle labeled “longest identity” (obtained using the −nobrief option) is used as the percent identity and is calculated as follows:

(Identical Residues×100)/(Length of the Referenced Sequence−Total Number of Gaps in Alignment)

[0094] For purposes described herein, the degree of sequence identity between two deoxyribonucleotide sequences is determined using the Needleman-Wunsch algorithm (Needleman and Wunsch, 1970, supra) as implemented in the Needle program of the EMBOSS package (EMBOSS: The European Molecular Biology Open Software Suite, Rice et al., 2000, supra), preferably version 3.0.0 or later. The optional parameters used are gap open penalty of 10, gap extension penalty of 0.5, and the EDNAFULL (EMBOSS version of NCBI NUC4.4) substitution matrix. The output of Needle labeled “longest identity” (obtained using the −nobrief option) is used as the percent identity and is calculated as follows:

(Identical Deoxyribonucleotides×100)/(Length of Referenced Sequence−Total Number of Gaps in Alignment)

[0095] Signal peptide: The term “signal peptide” is defined herein as a peptide linked (fused) in frame to the amino terminus of a polypeptide having biological activity and directs the polypeptide into the cell's secretory pathway. Signal sequences may be determined using techniques known in the art (See, e.g., Zhang and Henzel, 2004, Protein Science 13: 2819-2824).

[0096] Trehalase: The term “trehalase” means an enzyme which degrades trehalose into its unit monosaccharides (i.e., glucose). Trehalases are classified in EC 3.2.1.28 (alpha,alpha-trehalase) and EC. 3.2.1.93 (alpha,alpha-phosphotrehalase). The EC classes are based on recommendations of the Nomenclature Committee of the International Union of Biochemistry and Molecular Biology (IUBMB). Description of EC classes can be found on the internet, e.g., on “http://www.expasy.org/enzyme/”. Trehalases are enzymes that catalyze the following reactions:

[0097] EC 3.2.1.28: Alpha,alpha-trehalose+H₂O [symbol] 2 D-glucose;

[0098] EC 3.2.1. 93: Alpha,alpha-trehalose 6-phosphate+H₂O [symbol] D-glucose+D-glucose 6-phosphate.

[0099] Trehalase activity may be determined according to procedures known in the art.

[0100] Very high stringency conditions: The term “very high stringency conditions” means for probes of at least 100 nucleotides in length, prehybridization and hybridization at 42° C. in 5×SSPE, 0.3% SDS, 200 micrograms/ml sheared and denatured salmon sperm DNA, and 50% formamide, following standard Southern blotting procedures for 12 to 24 hours. The carrier material is finally washed three times each for 15 minutes using 0.2×SSC, 0.2% SDS at 70° C.

[0101] Very low stringency conditions: The term “very low stringency conditions” means for probes of at least 100 nucleotides in length, prehybridization and hybridization at 42° C. in 5×SSPE, 0.3% SDS, 200 micrograms/ml sheared and denatured salmon sperm DNA, and 25% formamide, following standard Southern blotting procedures for 12 to 24 hours. The carrier material is finally washed three times each for 15 minutes using 0.2×SSC, 0.2% SDS at 45° C.

[0102] Xylanase: The term “xylanase” means a 1,4-beta-D-xylan-xylohydrolase (E.C. 3.2.1.8) that catalyzes the endohydrolysis of 1,4-beta-D-xylosidic linkages in xylans. Xylanase activity can be determined with 0.2% AZCL-arabinoxylan as substrate in 0.01% TRITON® X-100 and 200 mM sodium phosphate pH 6 at 37° C. One unit of xylanase activity is defined as 1.0 μmole of azurine produced per minute at 37° C., pH 6 from 0.2% AZCL-arabinoxylan as substrate in 200 mM sodium phosphate pH 6.

[0103] Xylitol dehydrogenase: The term “xylitol dehydrogenase” or “XDH” (AKA D-xylulose reductase) is classified as E.C. 1.1.1.9 and means an enzyme that catalyzes the conversion of xylitol to D-xylulose. Xylitol dehydrogenase activity can be determined using methods known in the art (e.g., Richard et al., 1999, FEBS Letters 457, 135-138).

[0104] Xylose isomerase: The term “xylose isomerase” or “XI” means an enzyme which can catalyze D-xylose into D-xylulose in vivo, and convert D-glucose into D-fructose in vitro. Xylose isomerase is also known as “glucose isomerase” and is classified as E.C. 5.3.1.5. As the structure of the enzyme is very stable, the xylose isomerase is a good model for studying the relationships between protein structure and functions (Karimaki et al., Protein Eng Des Sel, 12004, 17 (12):861-869). Xylose Isomerase activity may be determined using techniques known in the art (e.g., a coupled enzyme assay using D-sorbitol dehygrogenase, as described by Verhoeven et al., 2017, Sci Rep 7, 46155).

[0105] Xylulokinase: The term “xylulokinase” or “XK” is classified as E.C. 2.7.1.17 and means an enzyme that catalyzes the conversion of D-xylulose to D-xylulose 5-phosphate. Xylulokinase activity can be determined using methods known in the art (e.g., Richard et al., 2000, FEBS Microbiol. Letters 190, 39-43)

[0106] L-xylulose reductase: The term “L-xylulose reductase” or “LXR” is classified as E.D. 1.1.1.10 and means an enzyme that catalyzes the conversion of L-xylulose to xylitol. L-xylulose reductase activity can be determined using methods known in the art (e.g., as described in U.S. Pat. No. 7,527,951).

[0107] Reference to “about” a value or parameter herein includes embodiments that are directed to that value or parameter per se. For example, description referring to “about X” includes the embodiment “X”. When used in combination with measured values, “about” includes a range that encompasses at least the uncertainty associated with the method of measuring the particular value, and can include a range of plus or minus two standard deviations around the stated value.

[0108] Likewise, reference to a gene or polypeptide that is “derived from” another gene or polypeptide X, includes the gene or polypeptide X.

[0109] As used herein and in the appended claims, the singular forms “a,” “or,” and “the” include plural referents unless the context clearly dictates otherwise.

[0110] It is understood that the embodiments described herein include “consisting” and/or “consisting essentially of” embodiments. As used herein, except where the context requires otherwise due to express language or necessary implication, the word “comprise” or variations such as “comprises” or “comprising” is used in an inclusive sense, i.e. to specify the presence of the stated features but not to preclude the presence or addition of further features in various embodiments.

### DETAILED DESCRIPTION

[0111] Described herein, inter alia, are host cells/fermentation organisms, and methods for producing a fermentation product, such as ethanol, from starch or cellulosic containing material. The Applicant surprisingly found a cluster of related L-xylulose reductase (LXR) genes that, when expressed in a yeast host, can provide exceptional arabinose utilization. These related genes are structurally distinct from those LXRs used in the art, as described in more detail below, which the Applicant believed is responsible for their unexpected superior performance. The Applicant also found that yeast can utilize arabinose in a fungal arabinose pathway that expresses the described heterologous LXR gene together with a heterologous aldose reductase (AR) and L-arabinitol 4-dehydrogenase (LAD), but without the need for expressing other heterologous genes of the pathway (See FIG. 1).

[0112] In one aspect is a method of producing a fermentation product from a starch-containing or cellulosic-containing material comprising:

(a) saccharifying the starch-containing or cellulosic-containing material; and
(b) fermenting the saccharified material of step (a) with a recombinant host cell;

[0113] wherein the cell has an active arabinose fermentation pathway and comprises:

[0114] (i) a heterologous polynucleotide encoding an aldose reductase (AR),

[0115] (ii) a heterologous polynucleotide encoding a L-arabinitol 4-dehydrogenase (LAD), and

[0116] (iii) a heterologous polynucleotide encoding a L-xylulose reductase (LXR);

[0117] wherein the L-xylulose reductase (LXR) has a mature polypeptide sequence with at least 60%, e.g., at least 65%, 70%, 75%, 80%, 85%, 90%, 95%, 97%, 98%, 99%, or 100% sequence identity to an LXR described here (e.g., any one of SEQ ID NOs: 297, 300, 302 and 304).

[0118] Steps a) and b) may be carried out either sequentially or simultaneously (SSF). In one embodiment, steps a) and b) are carried out simultaneously (SSF). In another embodiment, steps a) and b) are carried out sequentially.

[0119] In some embodiments of the methods described herein, fermentation of step (b) consumes a greater amount of arabinose e.g., at least 5%, 10%, 15%, 20%, 25%, 30%, 35%, 40%, 45%, 50%, 60%, 75% or 90% more when compared to the method using the same cell without the heterologous polynucleotide encoding a L-xylulose reductase (LXR) (e.g., under conditions described in the examples herein). In some embodiments, fermentation of step (b) consumes a greater amount of arabinose compared to the method using the same cell encoding the L-xylulose reductase (LXR) of SEQ ID NO: 305 (e.g., under conditions described in the examples herein). In some embodiments, more than 65%, e.g., at least 70%, 75%, 80%, 85%, 90%, 95% of arabinose in the medium is consumed.

### Host Cells and Fermenting Organisms

[0120] The host cells and fermenting organisms described herein may be derived from any host cell known to the skilled artisan, such as a cell capable of producing a fermentation product (e.g., ethanol). As used herein, a “derivative” of strain is derived from a referenced strain, such as through mutagenesis, recombinant DNA technology, mating, cell fusion, or cytoduction between yeast strains. Those skilled in the art will understand that the genetic alterations, including metabolic modifications exemplified herein, may be described with reference to a suitable host organism and their corresponding metabolic reactions or a suitable source organism for desired genetic material such as genes for a desired metabolic pathway. However, given the complete genome sequencing of a wide variety of organisms and the high level of skill in the area of genomics, those skilled in the art can apply the teachings and guidance provided herein to other organisms. For example, the metabolic alterations exemplified herein can readily be applied to other species by incorporating the same or analogous encoding nucleic acid from species other than the referenced species.

[0121] The host cells described herein can be from any suitable host, such as a yeast strain, including, but not limited to, a Saccharomyces, Rhodotorula, Schizosaccharomyces, Kluyveromyces, Pichia, Hansenula, Rhodospordium, Candida, Yarrowia, Lipomyces, Cryptococcus, or Dekkera sp. cell. In particular, Saccharomyces host cells are contemplated, such as Saccharomyces cerevisiae, bayanus or cadsbergensis cells. Preferably, the yeast cell is a Saccharomyces cerevisiae cell. Suitable cells can, for example, be derived from commercially available strains and polyploid or aneuploid industrial strains, including but not limited to those from Superstart™, THERMOSACC®, C5 FUEL™, XyloFerm®, etc. (Lallemand); RED STAR and ETHANOL RED® (Fermentis/Lesaffre); FALI (AB Mauri); Bakers Best Yeast, Bakers Compressed Yeast, etc. (Fleishmann's Yeast); BIOFERM AFT, XP, CF, and XR (North American Bioproducts Corp.); Turbo Yeast (Gert Strand AB); and FERMIOL® (DSM Specialties). Other useful yeast strains are available from biological depositories such as the American Type Culture Collection (ATCC) or the Deutsche Sammlung von Mikroorganismen und Zellkulturen GmbH (DSMZ), such as, e.g., BY4741 (e.g., ATCC 201388); Y108-1 (ATCC PTA.10567) and NRRL YB-1952 (ARS Culture Collection). Still other S. cerevisiae strains suitable as host cells DBY746, [Alpha][Eta]22, S150-2B, GPY55-15Ba, CEN.PK, USM21, TMB3500, TMB3400, VTT-A-63015, VTT-A-85068, VTT-c-79093 and their derivatives as well as Saccharomyces sp. 1400, 424A (LNH-ST), 259A (LNH-ST) and derivatives thereof. In one embodiment, the recombinant cell is a derivative of a strain Saccharomyces cerevisiae CIBTS1260 (deposited under Accession No. NRRL Y-50973 at the Agricultural Research Service Culture Collection (NRRL), Illinois 61604 U.S.A.).

[0122] The host cell or fermenting organism may be Saccharomyces strain, e.g., Saccharomyces cerevisiae strain produced using the method described and concerned in U.S. Pat. No. 8,257,959.

[0123] The strain may also be a derivative of Saccharomyces cerevisiae strain NMI V14/004037 (See, WO2015/143324 and WO02015/143317 each incorporated herein by reference), strain nos. V15/004035, V15/004036, and V15/004037 (See, WO02016/153924 incorporated herein by reference), strain nos. V15/001459, V15/001460, V15/001461 (See, WO02016/138437 incorporated herein by reference), strain no. NRRL Y67342 (See, WO02018/098381 incorporated herein by reference), strain nos. NRRL Y67549 and NRRL Y67700 (See, WO02019/161227 incorporated herein by reference), or any strain described in WO02017/087330 (incorporated herein by reference).

[0124] The fermenting organisms according to the invention have been generated in order to, e.g., improve fermentation yield and to improve process economy by cutting enzyme costs since part or all of the necessary enzymes needed to improve method performance are be produced by the fermenting organism.

[0125] The host cells and fermenting organisms described herein may utilize expression vectors comprising the coding sequence of one or more (e.g., two, several) heterologous genes linked to one or more control sequences that direct expression in a suitable cell under conditions compatible with the control sequence(s). Such expression vectors may be used in any of the cells and methods described herein. The polynucleotides described herein may be manipulated in a variety of ways to provide for expression of a desired polypeptide. Manipulation of the polynucleotide prior to its insertion into a vector may be desirable or necessary depending on the expression vector. The techniques for modifying polynucleotides utilizing recombinant DNA methods are well known in the art.

[0126] A construct or vector (or multiple constructs or vectors) comprising the one or more (e.g., two, several) heterologous genes may be introduced into a cell so that the construct or vector is maintained as a chromosomal integrant or as a self-replicating extra-chromosomal vector as described earlier.

[0127] The various nucleotide and control sequences may be joined together to produce a recombinant expression vector that may include one or more (e.g., two, several) convenient restriction sites to allow for insertion or substitution of the polynucleotide at such sites. Alternatively, the polynucleotide(s) may be expressed by inserting the polynucleotide(s) or a nucleic acid construct comprising the sequence into an appropriate vector for expression. In creating the expression vector, the coding sequence is located in the vector so that the coding sequence is operably linked with the appropriate control sequences for expression.

[0128] The recombinant expression vector may be any vector (e.g., a plasmid or virus) that can be conveniently subjected to recombinant DNA procedures and can bring about expression of the polynucleotide. The choice of the vector will typically depend on the compatibility of the vector with the host cell into which the vector is to be introduced. The vector may be a linear or closed circular plasmid.

[0129] The vector may be an autonomously replicating vector, i.e., a vector that exists as an extrachromosomal entity, the replication of which is independent of chromosomal replication, e.g., a plasmid, an extrachromosomal element, a minichromosome, or an artificial chromosome. The vector may contain any means for assuring self-replication. Alternatively, the vector may be one that, when introduced into the host cell, is integrated into the genome and replicated together with the chromosome(s) into which it has been integrated. Furthermore, a single vector or plasmid or two or more vectors or plasmids that together contain the total DNA to be introduced into the genome of the cell, or a transposon, may be used.

[0130] The expression vector may contain any suitable promoter sequence that is recognized by a cell for expression of a gene described herein. The promoter sequence contains transcriptional control sequences that mediate the expression of the polypeptide. The promoter may be any polynucleotide that shows transcriptional activity in the cell of choice including mutant, truncated, and hybrid promoters, and may be obtained from genes encoding extracellular or intracellular polypeptides either homologous or heterologous to the cell.

[0131] Each heterologous polynucleotide described herein may be operably linked to a promoter that is foreign to the polynucleotide. For example, in one embodiment, the nucleic acid construct encoding the polypeptide of interest is operably linked to a promoter foreign to the polynucleotide. The promoters may be identical to or share a high degree of sequence identity (e.g., at least about 80%, at least about 85%, at least about 90%, at least about 95%, at least about 96%, at least about 97%, at least about 98%, or at least about 99%) with a selected native promoter.

[0132] Examples of suitable promoters for directing the transcription of the nucleic acid constructs in a yeast cells, include, but are not limited to, the promoters obtained from the genes for enolase, (e.g., S. cerevisiae enolase or I. orientalis enolase (ENO1)), galactokinase (e.g., S. cerevisiae galactokinase or I. orientalis galactokinase (GAL1)), alcohol dehydrogenase/glyceraldehyde-3-phosphate dehydrogenase (e.g., S. cerevisiae alcohol dehydrogenase/glyceraldehyde-3-phosphate dehydrogenase or I. orientalis alcohol dehydrogenase/glyceraldehyde-3-phosphate dehydrogenase (ADH1, ADH2/GAP)), triose phosphate isomerase (e.g., S. cerevisiae triose phosphate isomerase or I. orientalis triose phosphate isomerase (TPI)), metallothionein (e.g., S. cerevisiae metallothionein or I. orientalis metallothionein (CUP1)), 3-phosphoglycerate kinase (e.g., S. cerevisiae 3-phosphoglycerate kinase or I. orientalis 3-phosphoglycerate kinase (PGK)), PDC1, aldose reductase (AR), xylitol dehydrogenase (XDH), L-(+)-lactate-cytochrome c oxidoreductase (CYB2), translation elongation factor-1 (TEF1), translation elongation factor-2 (TEF2), glyceraldehyde-3-phosphate dehydrogenase (GAPDH), and orotidine 5-phosphate decarboxylase (URA3) genes. Other suitable promoters may be obtained from S. cerevisiae TDH3, HXT7, PGK1, RPL18B and CCW12 genes. Additional useful promoters for yeast host cells are described by Romanos et al., 1992, Yeast 8: 423-488.

[0133] The control sequence may also be a suitable transcription terminator sequence, which is recognized by a host cell to terminate transcription. The terminator sequence is operably linked to the 3′-terminus of the polynucleotide encoding the polypeptide. Any terminator that is functional in the yeast cell of choice may be used. The terminator may be identical to or share a high degree of sequence identity (e.g., at least about 80%, at least about 85%, at least about 90%, at least about 95%, at least about 96%, at least about 97%, at least about 98%, or at least about 99%) with the selected native terminator.

[0134] Suitable terminators for yeast host cells may be obtained from the genes for enolase (e.g., S. cerevisiae or I. orientalis enolase cytochrome C (e.g., S. cerevisiae or I. orientalis cytochrome (CYC1)), glyceraldehyde-3-phosphate dehydrogenase (e.g., S. cerevisiae or I. orientalis glyceraldehyde-3-phosphate dehydrogenase (gpd)), PDC1, XR, XDH, transaldolase (TAL), transketolase (TKL), ribose 5-phosphate ketol-isomerase (RKI), CYB2, and the galactose family of genes (especially the GAL10 terminator). Other suitable terminators may be obtained from S. cerevisiae ENO2 or TEF1 genes. Additional useful terminators for yeast host cells are described by Romanos et al., 1992, supra.

[0135] The control sequence may also be an mRNA stabilizer region downstream of a promoter and upstream of the coding sequence of a gene which increases expression of the gene.

[0136] Examples of suitable mRNA stabilizer regions are obtained from a Bacillus thuringiensis cryIIIA gene (WO 94/25612) and a Bacillus subtilis SP82 gene (Hue et al., 1995, Journal of Bacteriology 177: 3465-3471).

[0137] The control sequence may also be a suitable leader sequence, when transcribed is a non-translated region of an mRNA that is important for translation by the host cell. The leader sequence is operably linked to the 5′-terminus of the polynucleotide encoding the polypeptide. Any leader sequence that is functional in the yeast cell of choice may be used.

[0138] Suitable leaders for yeast host cells are obtained from the genes for enolase (e.g., S. cerevisiae or I. orientalis enolase (ENO-1)), 3-phosphoglycerate kinase (e.g., S. cerevisiae or I. orientalis 3-phosphoglycerate kinase), alpha-factor (e.g., S. cerevisiae or I. orientalis alpha-factor), and alcohol dehydrogenase/glyceraldehyde-3-phosphate dehydrogenase (e.g., S. cerevisiae or I. orientalis alcohol dehydrogenase/glyceraldehyde-3-phosphate dehydrogenase (ADH2/GAP)).

[0139] The control sequence may also be a polyadenylation sequence; a sequence operably linked to the 3′-terminus of the polynucleotide and, when transcribed, is recognized by the host cell as a signal to add polyadenosine residues to transcribed mRNA. Any polyadenylation sequence that is functional in the host cell of choice may be used. Useful polyadenylation sequences for yeast cells are described by Guo and Sherman, 1995, Mol. Cellular Biol. 15: 5983-5990.

[0140] The control sequence may also be a signal peptide coding region that encodes a signal peptide linked to the N-terminus of a polypeptide and directs the polypeptide into the cell's secretory pathway. The 5′-end of the coding sequence of the polynucleotide may inherently contain a signal peptide coding sequence naturally linked in translation reading frame with the segment of the coding sequence that encodes the polypeptide. Alternatively, the 5′-end of the coding sequence may contain a signal peptide coding sequence that is foreign to the coding sequence. A foreign signal peptide coding sequence may be required where the coding sequence does not naturally contain a signal peptide coding sequence. Alternatively, a foreign signal peptide coding sequence may simply replace the natural signal peptide coding sequence in order to enhance secretion of the polypeptide. However, any signal peptide coding sequence that directs the expressed polypeptide into the secretory pathway of a host cell may be used. Useful signal peptides for yeast host cells are obtained from the genes for Saccharomyces cerevisiae alpha-factor and Saccharomyces cerevisiae invertase. Other useful signal peptide coding sequences are described by Romanos et al., 1992, supra. Signal peptides are also described in U.S. Provisional application No. 62/883,519, filed Aug. 6, 2019 (incorporated herein by reference).

[0141] The control sequence may also be a propeptide coding sequence that encodes a propeptide positioned at the N-terminus of a polypeptide. The resultant polypeptide is known as a proenzyme or propolypeptide (or a zymogen in some cases). A propolypeptide is generally inactive and can be converted to an active polypeptide by catalytic or autocatalytic cleavage of the propeptide from the propolypeptide. The propeptide coding sequence may be obtained from the genes for Bacillus subtilis alkaline protease (aprE), Bacillus subtilis neutral protease (nprT), Myceliophthora thermophila laccase (WO 95/33836), Rhizomucor miehei aspartic proteinase, and Saccharomyces cerevisiae alpha-factor.

[0142] Where both signal peptide and propeptide sequences are present, the propeptide sequence is positioned next to the N-terminus of a polypeptide and the signal peptide sequence is positioned next to the N-terminus of the propeptide sequence.

[0143] It may also be desirable to add regulatory sequences that allow the regulation of the expression of the polypeptide relative to the growth of the host cell. Examples of regulatory systems are those that cause the expression of the gene to be turned on or off in response to a chemical or physical stimulus, including the presence of a regulatory compound. Regulatory systems in prokaryotic systems include the lac, tac, and trp operator systems. In yeast, the ADH2 system or GAL1 system may be used.

[0144] The vectors may contain one or more (e.g., two, several) selectable markers that permit easy selection of transformed, transfected, transduced, or the like cells. A selectable marker is a gene the product of which provides for biocide or viral resistance, resistance to heavy metals, prototrophy to auxotrophs, and the like. Suitable markers for yeast host cells include, but are not limited to, ADE2, HIS3, LEU2, LYS2, MET3, TRP1, and URA3.

[0145] The vectors may contain one or more (e.g., two, several) elements that permit integration of the vector into the host cell's genome or autonomous replication of the vector in the cell independent of the genome.

[0146] For integration into the host cell genome, the vector may rely on the polynucleotide's sequence encoding the polypeptide or any other element of the vector for integration into the genome by homologous or non-homologous recombination. Alternatively, the vector may contain additional polynucleotides for directing integration by homologous recombination into the genome of the host cell at a precise location(s) in the chromosome(s). To increase the likelihood of integration at a precise location, the integrational elements should contain a sufficient number of nucleic acids, such as 100 to 10,000 base pairs, 400 to 10,000 base pairs, and 800 to 10,000 base pairs, which have a high degree of sequence identity to the corresponding target sequence to enhance the probability of homologous recombination. The integrational elements may be any sequence that is homologous with the target sequence in the genome of the host cell. Furthermore, the integrational elements may be non-encoding or encoding polynucleotides. On the other hand, the vector may be integrated into the genome of the host cell by non-homologous recombination. Potential integration loci include those described in the art (e.g., See US2012/0135481).

[0147] For autonomous replication, the vector may further comprise an origin of replication enabling the vector to replicate autonomously in the yeast cell. The origin of replication may be any plasmid replicator mediating autonomous replication that functions in a cell. The term “origin of replication” or “plasmid replicator” means a polynucleotide that enables a plasmid or vector to replicate in vivo. Examples of origins of replication for use in a yeast host cell are the 2 micron origin of replication, ARS1, ARS4, the combination of ARS1 and CEN3, and the combination of ARS4 and CEN6.

[0148] More than one copy of a polynucleotide described herein may be inserted into a host cell to increase production of a polypeptide. An increase in the copy number of the polynucleotide can be obtained by integrating at least one additional copy of the sequence into the yeast cell genome or by including an amplifiable selectable marker gene with the polynucleotide where cells containing amplified copies of the selectable marker gene, and thereby additional copies of the polynucleotide, can be selected for by cultivating the cells in the presence of the appropriate selectable agent.

[0149] The procedures used to ligate the elements described above to construct the recombinant expression vectors described herein are well known to one skilled in the art (see, e.g., Sambrook et al., 1989, Molecular Cloning, A Laboratory Manual, 2d edition, Cold Spring Harbor, New York).

[0150] Additional procedures and techniques known in the art for the preparation of recombinant cells for ethanol fermentation, are described in, e.g., WO2016/045569, the content of which is hereby incorporated by reference.

[0151] The host cell or fermenting organism may be in the form of a composition comprising a host cell or fermenting organism (e.g., a yeast strain described herein) and a naturally occurring and/or a non-naturally occurring component.

[0152] The host cell or fermenting organism described herein may be in any viable form, including crumbled, dry, including active dry and instant, compressed, cream (liquid) form etc. In one embodiment, the host cell or fermenting organism (e.g., a Saccharomyces cerevisiae yeast strain) is dry yeast, such as active dry yeast or instant yeast. In one embodiment, the host cell or fermenting organism (e.g., a Saccharomyces cerevisiae yeast strain) is crumbled yeast. In one embodiment, the host cell or fermenting organism (e.g., a Saccharomyces cerevisiae yeast strain) is compressed yeast. In one embodiment, the host cell or fermenting organism (e.g., a Saccharomyces cerevisiae yeast strain) is cream yeast.

[0153] In one embodiment is a composition comprising a host cell or fermenting organism described herein (e.g., a Saccharomyces cerevisiae yeast strain), and one or more of the component selected from the group consisting of: surfactants, emulsifiers, gums, swelling agent, and antioxidants and other processing aids.

[0154] The compositions described herein may comprise a host cell or fermenting organism described herein (e.g., a Saccharomyces cerevisiae yeast strain) and any suitable surfactants.

[0155] In one embodiment, the surfactant(s) is/are an anionic surfactant, cationic surfactant, and/or nonionic surfactant.

[0156] The compositions described herein may comprise a host cell or fermenting organism described herein (e.g., a Saccharomyces cerevisiae yeast strain) and any suitable emulsifier.

[0157] In one embodiment, the emulsifier is a fatty-acid ester of sorbitan. In one embodiment, the emulsifier is selected from the group of sorbitan monostearate (SMS), citric acid esters of monodiglycerides, polyglycerolester, fatty acid esters of propylene glycol.

[0158] In one embodiment, the composition comprises a host cell or fermenting organism described herein (e.g., a Saccharomyces cerevisiae yeast strain), and Olindronal SMS, Olindronal SK, or Olindronal SPL including composition concerned in European Patent No. 1,724,336 (hereby incorporated by reference). These products are commercially available from Bussetti, Austria, for active dry yeast.

[0159] The compositions described herein may comprise a host cell or fermenting organism described herein (e.g., a Saccharomyces cerevisiae yeast strain) and any suitable gum. In one embodiment, the gum is selected from the group of carob, guar, tragacanth, arabic, xanthan and acacia gum, in particular for cream, compressed and dry yeast.

[0160] The compositions described herein may comprise a host cell or fermenting organism described herein (e.g., a Saccharomyces cerevisiae yeast strain) and any suitable swelling agent. In one embodiment, the swelling agent is methyl cellulose or carboxymethyl cellulose.

[0161] The compositions described herein may comprise a host cell or fermenting organism described herein (e.g., a Saccharomyces cerevisiae yeast strain) and any suitable anti-oxidant. In one embodiment, the antioxidant is butylated hydroxyanisol (BHA) and/or butylated hydroxytoluene (BHT), or ascorbic acid (vitamin C), particular for active dry yeast.

### Active Arabinose Fermentation Pathway

[0162] The host cells or fermenting organisms described herein (e.g., yeast cells) comprise an active arabinose fermentation pathway expressing a heterologous L-xylulose reductase (LXR).

[0163] As shown in FIG. 1, L-xylulose reductase (LXR) is an enzyme used in a “fungal pathway” that proceeds from L-arabinose to D-xyluluose-5-phosphate, where the L-xylulose reductase provides enzymatic activity for converting L-xylulose to xylitol. This pathway also includes transformations from enzymes aldose reductase (AR), L-arabinitol 4-dehydrogenase (LAD), xylitol dehydrogenase (XDH, also known as D-xylulose reductase) and xylulokinase (XK). As described in the examples, the Applicant has shown that arabinose can be consumed through heterologous expression of AR, LAD and LXR, even without heterologous expression of remaining enzymes of the pathway XDH and XK.

[0164] However, strains expressing the LXR previously used and described in U.S. Pat. No. 7,527,951 (Trichoderma reesei, SEQ ID NO: 305) were unable to grow on arabinose agar plates even with heterologous expression of the full pathway (See Example 1). Upon screening yeasts expressing putative LXRs (Table 1) on agarose, the Applicant found that expression of most putative LXRs showed no growth (SEQ ID NOs: 298, 299, 303, 305, 307, 308) or only minimal growth (SEQ ID NOs: 301 and 306), but a subset of LXRs showed substantial growth (SEQ ID NOs: 297, 300, 302, 304).

TABLE 1

| | | SEQ ID NO: |
|---|---|---|
| Donor Organism | Gene ID | (mature polypeptide) |
| A. brasiliensis | EFP7G1BZ1 | 297 |
| C. sorboxylosa | EFP5PTNSX | 298 |
| B. anomalus | EFP480208 | 299 |
| T. leycettanus | EFP3RCJ9K | 300 |
| K. capsulata | EFP2CH8R5 | 301 |
| A. aculeatus | EFP2BNSMN | 302 |
| P. membranifaciens | EFP16N8ZZ | 303 |
| A. niger | G3YG17 | 304 |
| T. reesei | Q8NK50 | 305 |
| A. monospora | Q70FD1 | 306 |
| C. arabinofermentans | A0A1E4T269 | 307 |
| O. parapolymorpha | E7R859 | 308 |

[0165] Those LXRs that resulted in substantial growth were found to be genetically distinct from the remaining LXRs that showed only minimal or no cell growth under the same conditions, including the T. reesei LXR of SEQ ID NO: 305 previously described in U.S. Pat. No. 7,527,951. Table 2 below shows a matrix of sequence homology among the screened LXRs. More than 70% sequence identity is shared among the best LXRs of SEQ ID NOs: 297, 300, 302, 304, while each share less than 20% sequence identity to the remaining poor performing LXRs (including only about 16% identity to previously described T. reesei LXR of SEQ ID NO: 305). FIG. 2 shows a functional diversity tree for the expressed LXRs. The cluster of LXRs that provided substantial cell growth on arabinose agar plates is indicated with a box.

TABLE 2

| SEQ | SEQ ID NO: | | | | | | | | | | | |
|---|---|---|---|---|---|---|---|---|---|---|---|---|
| ID NO: | 302 | 304 | 297 | 300 | 306 | 301 | 308 | 305 | 299 | 303 | 307 | 298 |
| 302 | 100 | 78 | 79 | 70 | 19 | 18 | 18 | 16 | 17 | 18 | 19 | 17 |
| 304 | 78 | 100 | 91 | 71 | 17 | 18 | 18 | 16 | 16 | 17 | 18 | 16 |
| 297 | 79 | 91 | 100 | 71 | 18 | 18 | 18 | 16 | 16 | 17 | 18 | 16 |
| 300 | 70 | 71 | 71 | 100 | 19 | 17 | 19 | 16 | 18 | 19 | 19 | 18 |
| 306 | 19 | 17 | 18 | 19 | 100 | 59 | 70 | 33 | 59 | 59 | 68 | 60 |
| 301 | 18 | 18 | 18 | 17 | 59 | 100 | 64 | 32 | 56 | 55 | 61 | 53 |
| 308 | 18 | 18 | 18 | 19 | 70 | 64 | 100 | 34 | 65 | 68 | 79 | 68 |
| 305 | 16 | 16 | 16 | 16 | 33 | 32 | 34 | 100 | 32 | 31 | 33 | 31 |
| 299 | 17 | 16 | 16 | 18 | 59 | 56 | 65 | 32 | 100 | 58 | 64 | 60 |
| 303 | 18 | 17 | 17 | 19 | 59 | 55 | 68 | 31 | 58 | 100 | 67 | 82 |
| 307 | 19 | 18 | 18 | 19 | 68 | 61 | 79 | 33 | 64 | 67 | 100 | 66 |
| 298 | 17 | 16 | 16 | 18 | 60 | 53 | 68 | 31 | 60 | 82 | 66 | 100 |

[0166] A Multiple Sequence Alignment of SEQ ID NOs: 297, 300, 302, and 304 is shown in FIG. 3 to illustrate the common residues among this identified cluster of LXRs.

[0167] In one embodiment, the L-xylulose reductase (LXR) comprises or consists of the amino acid sequence of any one of SEQ ID NOs: 297, 300, 302 and 304. In another embodiment, the LXR is a fragment of the LXR of any one of SEQ ID NOs: 297, 300, 302 and 304, wherein, e.g., the fragment has LXR activity. In one embodiment, the number of amino acid residues in the fragment is at least 75%, e.g., at least 80%, 85%, 90%, or 95% of the number of amino acid residues in referenced full length LXR (e.g. any one of SEQ ID NOs: 297, 300, 302 and 304). In other embodiments, the LXR may comprise the catalytic domain of any LXR described or referenced herein (e.g., the catalytic domain of any one of SEQ ID NOs: 297, 300, 302 and 304).

[0168] In some embodiments, the host cells or fermenting organisms comprising a heterologous polynucleotide encoding a L-xylulose reductase (LXR) have an increased level of LXR activity compared to the host cells without the heterologous polynucleotide encoding the LXR, when cultivated under the same conditions. In some embodiments, the host cells have an increased level of LXR activity of at least 5%, e.g., at least 10%, at least 15%, at least 20%, at least 25%, at least 50%, at least 100%, at least 150%, at least 200%, at least 300%, or at 500% compared to the host cells without the heterologous polynucleotide encoding the LXR, when cultivated under the same conditions.

[0169] The L-xylulose reductase (LXR) may be a variant or homolog (e.g. natural or synthetic) of any one of the LXRs described supra (e.g., any one of SEQ ID NOs: 297, 300, 302 and 304). In one embodiment, the LXR has at least 60%, e.g., at least 65%, 70%, 75%, 80%, 85%, 90%, 95%, 97%, 98%, 99%, or 100% sequence identity to any one of the LXRs described supra (e.g., any one of SEQ ID NOs: 297, 300, 302 and 304).

[0170] The L-xylulose reductase (LXR) may be a bacterial LXR. For example, the LXR may be derived from a Gram-positive bacterium such as a Bacillus, Clostridium, Enterococcus, Geobacillus, Lactobacillus, Lactococcus, Oceanobacillus, Staphylococcus, Streptococcus, or Streptomyces, or a Gram-negative bacterium such as a Campylobacter, E. coli, Flavobacterium, Fusobacterium, Helicobacter, Ilyobacter, Neisseria, Pseudomonas, Salmonella, or Ureaplasma.

[0171] In one embodiment, the L-xylulose reductase (LXR) is derived from Bacillus alkalophilus, Bacillus amyloliquefaciens, Bacillus brevis, Bacillus circulans, Bacillus clausii, Bacillus coagulans, Bacillus firmus, Bacillus lautus, Bacillus lentus, Bacillus licheniformis, Bacillus megaterium, Bacillus pumilus, Bacillus stearothermophilus, Bacillus subtilis, or Bacillus thuringiensis.

[0172] In another embodiment, the L-xylulose reductase (LXR) is derived from Streptococcus 20 equisimilis, Streptococcus pyogenes, Streptococcus uberis, or Streptococcus equi subsp. Zooepidemicus.

[0173] In another embodiment, the L-xylulose reductase (LXR) is derived from Streptomyces achromogenes, Streptomyces avermitilis, Streptomyces coelicolor, Streptomyces griseus, or Streptomyces lividans.

[0174] The L-xylulose reductase (LXR) may be a fungal LXR. For example, the LXR may be derived from a yeast such as a Candida, Kluyveomyces, Pichia, Saccharomyces, Schizosaccharomyces, Yarrowia or Issatchenkia; or derived from a filamentous fungus such as an Acremonium, Agaricus, Altemaria, Aspergillus, Aureobasidium, Botryosphaeria, Ceriponopsis, Chaetomidium, Chrysosporium, Claviceps, Cochliobolus, Coprinopsis, Coptotermes, Corynascus, Cryphonectria, Cryptococcus, Diplodia, Exidia, Filibasidium, Fusarium, Gibberella, Holomastigotoides, Humicola, Irpex, Lentinula, Leptospaeria, Magnaporthe, Melanocarpus, Meripilus, Mucor, Myceliophthora, Neocallimastix, Neurospora, Paecilomyces, Penicillium, Phaneochaete, Piromyces, Poitasia, Pseudoplectania, Pseudotrichonympha, Rhizomucor, Schizophyllum, Scytalidium, Talaomyces, Thermoascus, Thielavia, Tolypocladium, Trichoderma, Trichophaea, Verticillium, Volvariella, or Xylaria.

[0175] In another embodiment, the L-xylulose reductase (LXR) is derived from Saccharomyces carlsbergensis, Saccharomyces cerevisiae, Saccharomyces diastaticus, Saccharomyces douglasii, Saccharomyces kluyveri, Saccharomyces norbensis, or Saccharomyces oviformis.

[0176] In another embodiment, the L-xylulose reductase (LXR) is derived from Acremonium cellulolyticus, Aspergillus aculeatus, Aspergillus awamori, Aspergillus foetidus, Aspergillus fumigatus, Aspergillus japonicus, Aspergillus nidulans, Aspergillus niger, Aspergillus oryzae, Chrysosporium inops, Chrysosporium keratinophilum, Chrysosporium lucknowense, Chrysosporium merdarium, Chrysosporium pannicola, Chrysosporium queenslandicum, Chrysosporium tropicum, Chrysosporium zonatum, Fusarium bactridioides, Fusarium cerealis, Fusarium crookwellense, Fusarium culmorum, Fusarium graminearum, Fusarium graminum, Fusarium heterosporum, Fusarium negundi, Fusarium oxysporum, Fusarium reticulatum, Fusanum roseum, Fusanum sambucinum, Fusanum sarcochroum, Fusarium sporotrichioides, Fusarium sulphureum, Fusarium torulosum, Fusarium trichothecioides, Fusarium venenatum, Humicola grisea, Humicola insolens, Humicola lanuginosa, Irpex lacteus, Mucor miehei, Myceliophthora thermophila, Neurospora crassa, Penicillium funiculosum, Penicillium purpurogenum, Phanerochaete chrysosporium, Thielavia achromatica, Thielavia albomyces, Thielavia albopilosa, Thielavia australeinsis, Thielavia fimeti, Thielavia microspora, Thielavia ovispora, Thielavia peruviana, Thielavia setosa, Thielavia spededonium, Thielavia subthermophila, Thielavia terrestris, Trichoderma harzianum, Trichoderma koningii, Trichoderma longibrachiatum, Trichoderma reesei, or Trichoderma viride.

[0177] It will be understood that for the aforementioned species, the invention encompasses both the perfect and imperfect states, and other taxonomic equivalents, e.g., anamorphs, regardless of the species name by which they are known. Those skilled in the art will readily recognize the identity of appropriate equivalents.

[0178] Strains of these species are readily accessible to the public in a number of culture collections, such as the American Type Culture Collection (ATCC), Deutsche Sammlung von Mikroorganismen und Zellkulturen GmbH (DSMZ), Centraalbureau Voor Schimmelcultures (CBS), and Agricultural Research Service Patent Culture Collection, Northern Regional Research Center (NRRL).

[0179] The L-xylulose reductase (LXR) coding sequences described or referenced herein, or a subsequence thereof, as well as the LXR described or referenced herein, or a fragment thereof, may be used to design nucleic acid probes to identify and clone DNA encoding a LXR from strains of different genera or species according to methods well known in the art. In particular, such probes can be used for hybridization with the genomic DNA or cDNA of a cell of interest, following standard Southern blotting procedures, in order to identify and isolate the corresponding gene therein. Such probes can be considerably shorter than the entire sequence, but should be at least 15, e.g., at least 25, at least 35, or at least 70 nucleotides in length. Preferably, the nucleic acid probe is at least 100 nucleotides in length, e.g., at least 200 nucleotides, at least 300 nucleotides, at least 400 nucleotides, at least 500 nucleotides, at least 600 nucleotides, at least 700 nucleotides, at least 800 nucleotides, or at least 900 nucleotides in length. Both DNA and RNA probes can be used. The probes are typically labeled for detecting the corresponding gene (for example, with ³²P, ³H, ³⁵S, biotin, or avidin).

[0180] A genomic DNA or cDNA library prepared from such other strains may be screened for DNA that hybridizes with the probes described above and encodes a sugar transporter. Genomic or other DNA from such other strains may be separated by agarose or polyacrylamide gel electrophoresis, or other separation techniques. DNA from the libraries or the separated DNA may be transferred to and immobilized on nitrocellulose or other suitable carrier material. In order to identify a clone or DNA that hybridizes with a coding sequence, or a subsequence thereof, the carrier material is used in a Southern blot.

[0181] In one embodiment, the nucleic acid probe is a polynucleotide, or subsequence thereof, that encodes the L-xylulose reductase (LXR) of any one of SEQ ID NOs: 297, 300, 302 and 304, or a fragment thereof.

[0182] For purposes of the probes described above, hybridization indicates that the polynucleotide hybridizes to a labeled nucleic acid probe, or the full-length complementary strand thereof, or a subsequence of the foregoing; under very low to very high stringency conditions. Molecules to which the nucleic acid probe hybridizes under these conditions can be detected using, for example, X-ray film. Stringency and washing conditions are defined as described supra.

[0183] In one embodiment, the L-xylulose reductase (LXR) is encoded by a polynucleotide that hybridizes under at least low stringency conditions, e.g., medium stringency conditions, medium-high stringency conditions, high stringency conditions, or very high stringency conditions with the full-length complementary strand of the coding sequence for any one of the LXRs described or referenced herein (e.g., SEQ ID NOs: 297, 300, 302 and 304). (Sambrook et al., 1989, Molecular Cloning, A Laboratory Manual, 2d edition, Cold Spring Harbor, New York).

[0184] The L-xylulose reductase (LXR) may also be identified and obtained from other sources including microorganisms isolated from nature (e.g., soil, composts, water, silage, etc.) or DNA samples obtained directly from natural materials (e.g., soil, composts, water, silage, etc.) using the above-mentioned probes. Techniques for isolating microorganisms and DNA directly from natural habitats are well known in the art. The polynucleotide encoding an LXR may then be derived by similarly screening a genomic or cDNA library of another microorganism or mixed DNA sample.

[0185] Once a polynucleotide encoding a L-xylulose reductase (LXR) has been detected with a suitable probe as described herein, the sequence may be isolated or cloned by utilizing techniques that are known to those of ordinary skill in the art (See, e.g., Sambrook et al., 1989, supra). Techniques used to isolate or clone polynucleotides encoding LXRs include isolation from genomic DNA, preparation from cDNA, or a combination thereof. The cloning of the polynucleotides from such genomic DNA can be affected, e.g., by using the well-known polymerase chain reaction (PCR) or antibody screening of expression libraries to detect cloned DNA fragments with shares structural features (See, e.g., Innis et al., 1990, PCR: A Guide to Methods and Application, Academic Press, New York). Other nucleic acid amplification procedures such as ligase chain reaction (LCR), ligated activated transcription (LAT) and nucleotide sequence-based amplification (NASBA) may be used.

[0186] In one embodiment, the L-xylulose reductase (LXR) sequence differs by no more than ten amino acids, e.g., by no more than five amino acids, by no more than four amino acids, by no more than three amino acids, by no more than two amino acids, or by one amino acid from the amino acid sequence of any one of the LXRs described supra (e.g., any one of SEQ ID NOs: 297, 300, 302 and 304). In one embodiment, the LXR has an amino acid substitution, deletion, and/or insertion of one or more (e.g., two, several) of amino acid sequence of any one of the LXRs described supra (e.g., any one of SEQ ID NOs: 297, 300, 302 and 304). In some embodiments, the total number of amino acid substitutions, deletions and/or insertions is not more than 10, e.g., not more than 9, 8, 7, 6, 5, 4, 3, 2, or 1.

[0187] The amino acid changes are generally of a minor nature, that is conservative amino acid substitutions or insertions that do not significantly affect the folding and/or activity of the protein; small deletions, typically of one to about 30 amino acids; small amino-terminal or carboxyl-terminal extensions, such as an amino-terminal methionine residue; a small linker peptide of up to about 20-25 residues; or a small extension that facilitates purification by changing net charge or another function, such as a poly-histidine tract, an antigenic epitope or a binding domain.

[0188] Examples of conservative substitutions are within the group of basic amino acids (arginine, lysine and histidine), acidic amino acids (glutamic acid and aspartic acid), polar amino acids (glutamine and asparagine), hydrophobic amino acids (leucine, isoleucine and valine), aromatic amino acids (phenylalanine, tryptophan and tyrosine), and small amino acids (glycine, alanine, serine, threonine and methionine). Amino acid substitutions that do not generally alter specific activity are known in the art and are described, for example, by H.

[0189] Neurath and R. L. Hill, 1979, In, The Proteins, Academic Press, New York. The most commonly occurring exchanges are Ala/Ser, Val/Ile, Asp/Glu, Thr/Ser, Ala/Gly, Ala/Thr, Ser/Asn, Ala/Val, Ser/Gly, Tyr/Phe, Ala/Pro, Lys/Arg, Asp/Asn, Leu/Ile, Leu/Val, Ala/Glu, and Asp/Gly.

[0190] Alternatively, the amino acid changes are of such a nature that the physico-chemical properties of the polypeptides are altered. For example, amino acid changes may improve the thermal stability of the LXRs, alter the substrate specificity, change the pH optimum, and the like.

[0191] Essential amino acids can be identified according to procedures known in the art, such as site-directed mutagenesis or alanine-scanning mutagenesis (Cunningham and Wells, 1989, Science 244: 1081-1085). In the latter technique, single alanine mutations are introduced at every residue in the molecule, and the resultant mutant molecules are tested for activity to identify amino acid residues that are critical to the activity of the molecule. See also, Hilton et al., 1996, J. Biol. Chem. 271: 4699-4708. The active site or other biological interaction can also be determined by physical analysis of structure, as determined by such techniques as nuclear magnetic resonance, crystallography, electron diffraction, or photoaffinity labeling, in conjunction with mutation of putative contact site amino acids (See, for example, de Vos et al., 1992, Science 255: 306-312; Smith et al., 1992, J. Mol. Biol. 224: 899-904; Wlodaver et al., 1992, FEBS Lett. 309: 59-64). The identities of essential amino acids can also be inferred from analysis of identities with other LXRs that are related to the referenced LXR.

[0192] Additional guidance on the structure-activity relationship of the L-xylulose reductases (LXRs) herein can be determined using multiple sequence alignment (MSA) techniques well-known in the art. Based on the teachings herein, the skilled artisan could make similar alignments with any number of LXRs described herein or known in the art (e.g., an MSA of SEQ ID NOs: 297, 300, 302 and 304, as shown in FIG. 3). Such alignments aid the skilled artisan to determine potentially relevant domains (e.g., binding domains or catalytic domains), as well as which amino acid residues are conserved and not conserved among the different transporter sequences. It is appreciated in the art that changing an amino acid that is conserved at a particular position between disclosed polypeptides will more likely result in a change in biological activity (Bowie et al., 1990, Science 247: 1306-1310: “Residues that are directly involved in protein functions such as binding or catalysis will certainly be among the most conserved). In contrast, substituting an amino acid that is not highly conserved among the polypeptides will not likely or significantly alter the biological activity.

[0193] Even further guidance on the structure-activity relationship for the skilled artisan can be found in published x-ray crystallography studies known in the art.

[0194] Single or multiple amino acid substitutions, deletions, and/or insertions can be made and tested using known methods of mutagenesis, recombination, and/or shuffling, followed by a relevant screening procedure, such as those disclosed by Reidhaar-Olson and Sauer, 1988, Science 241: 53-57; Bowie and Sauer, 1989, Proc. Natl. Acad. Sci. USA 86: 2152-2156; WO95/17413; or WO095/22625. Other methods that can be used include error-prone PCR, phage display (e.g., Lowman et al., 1991, Biochemistry 30: 10832-10837; U.S. Pat. No. 5,223,409; WO92/06204), and region-directed mutagenesis (Derbyshire et al., 1986, Gene 46: 145; Ner et al., 1988, DNA 7: 127).

[0195] Mutagenesis/shuffling methods can be combined with high-throughput, automated screening methods to detect activity of cloned, mutagenized polypeptides expressed by host cells (Ness et al., 1999, Nature Biotechnology 17: 893-896). Mutagenized DNA molecules that encode active GAPNs can be recovered from the host cells and rapidly sequenced using standard methods in the art. These methods allow the rapid determination of the importance of individual amino acid residues in a polypeptide.

[0196] In another embodiment, the heterologous polynucleotide encoding the L-xylulose reductase (LXR) comprises a coding sequence having at least 60%, e.g., at least 65%, at least 70%, at least 75%, at least 80%, at least 85%, at least 90%, at least 95%, at least 96%, at least 97%, at least 98%, at least 99%, or 100% sequence identity to the coding sequence of any one of the LXRs described supra (e.g., any one of SEQ ID NOs: 297, 300, 302 and 304).

[0197] In one embodiment, the heterokogous polynucleotide encoding the L-xylulose reductase (LXR) comprises or consists of the coding sequence of any one of the LXRs described supra (e.g., any one of SEQ ID NOs: 297, 300, 302 and 304). In another embodiment, the heterologous polynucleotide encoding the LXR comprises a subsequence of the coding sequence of any one of the LXRs described supra (e.g., any one of SEQ ID NOs: 297, 300, 302 and 304) wherein the subsequence encodes a polypeptide having LXR activity. In another embodiment, the number of nucleotides residues in the coding subsequence is at least 75%, e.g., at least 80%, 85%, 90%, or 95% of the number of the referenced coding sequence.

[0198] The referenced coding sequence of any related aspect or embodiment described herein can be the native coding sequence or a degenerate sequence, such as a codon-optimized coding sequence designed for use in a particular host cell (e.g., optimized for expression in Saccharomyces cerevisiae). Codon-optimization for expression in yeast cells is known in the art (e.g., U.S. Pat. No. 8,326,547).

[0199] The L-xylulose reductase (LXR) may be a fused polypeptide or cleavable fusion polypeptide in which another polypeptide is fused at the N-terminus or the C-terminus of the LXR. A fused polypeptide may be produced by fusing a polynucleotide encoding another polypeptide to a polynucleotide encoding the LXR. Techniques for producing fusion polypeptides are known in the art, and include ligating the coding sequences encoding the polypeptides so that they are in frame and that expression of the fused polypeptide is under control of the same promoter(s) and terminator. Fusion proteins may also be constructed using intein technology in which fusions are created post-translationally (Cooper et al., 1993, EMBO J. 12: 2575-2583; Dawson et al., 1994, Science 266: 776-779).

[0200] In addition to the heterologous L-xylulose reductase (LXR), any suitable arabinose fermentation pathway gene, endogenous or heterologous, may be used and expressed in sufficient amount to produce an enzyme involved in the pathway. With the complete genome sequence available for now numerous microorganism genomes and a variety of yeast, fungi, plant, and mammalian genomes, the identification of genes encoding the selected arabinose fermentation pathway enzymatic activities taught herein is routine and well known in the art for a selected host. For example, suitable homologues, orthologs, paralogs and nonorthologous gene displacements of known genes, and the interchange of genetic alterations between organisms can be identified in related or distant host to a selected host.

[0201] For host cells without a known genome sequence, sequences for genes of interest (either as overexpression candidates or as insertion sites) can typically be obtained using techniques known in the art. Routine experimental design can be employed to test expression of various genes and activity of various enzymes, including genes and enzymes that function in a pentose fermentation pathway. Experiments may be conducted wherein each enzyme is expressed in the cell individually and in blocks of enzymes up to and including preferably all pathway enzymes, to establish which are needed (or desired) for improved pentose fermentation. One illustrative experimental design tests expression of each individual enzyme as well as of each unique pair of enzymes, and further can test expression of all required enzymes, or each unique combination of enzymes. A number of approaches can be taken, as will be appreciated.

[0202] The host cells of the invention can be produced by introducing heterologous polynucleotides encoding one or more of the enzymes participating in an active arabinose fermentation pathway, as described below. As one in the art will appreciate, in some instances (e.g., depending on the selection of host) the heterologous expression of every gene shown in the active arabinose fermentation may not be required since a host cell may have endogenous enzymatic activity from one or more pathway genes. For example, if a chosen host is deficient in one or more enzymes of an active arabinose fermentation pathway, then heterologous polynucleotides for the deficient enzyme(s) are introduced into the host for subsequent expression. Alternatively, if the chosen host exhibits endogenous expression of some pathway genes, but is deficient in others, then an encoding polynucleotide is needed for the deficient enzyme(s) to achieve arabinose fermentation. Thus, a recombinant host cell of the invention can be produced by introducing heterologous polynucleotides to obtain the enzyme activities of a desired biosynthetic pathway or a desired biosynthetic pathway can be obtained by introducing one or more heterologous polynucleotides that, together with one or more endogenous enzymes, produces a desired product such as ethanol.

[0203] The host cells of the invention will include at least one heterologous polynucleotide encoding an L-xylulose reductase (LXR) described above and optionally up to all encoding heterologous polynucleotides for the arabinose fermentation pathway. For example, arabinose fermentation can be established in a host deficient in an arabinose fermentation pathway enzyme through heterologous expression of the corresponding polynucleotide. In a host deficient in all enzymes of an arabinose fermentation pathway, heterologous expression of all enzymes in the pathway can be included, although it is understood that all enzymes of a pathway can be expressed even if the host contains at least one of the pathway enzymes.

[0204] The enzymes of the selected active arabinose fermentation pathway, and activities thereof, can be detected using methods known in the art or as described herein. These detection methods may include use of specific antibodies, formation of an enzyme product, or disappearance of an enzyme substrate. See, for example, Sambrook et al., Molecular Cloning: A Laboratory Manual, Third Ed., Cold Spring Harbor Laboratory, New York (2001); Ausubel et al., Current Protocols in Molecular Biology, John Wiley and Sons, Baltimore, Md. (1999); and Hanai et al., Appl. Environ. Microbiol. 73:7814-7818 (2007)).

[0205] In one embodiment, the host cell or fermenting organism (e.g., yeast cell) further comprises a heterologous polynucleotide encoding an aldose reductase (AR). An aldose reductase, as used herein, provides enzymatic activity for converting L-arabinose to L-arabitol, and may also have enzymatic activity for converting D-xylose to xylitol (known as a xylose reductase, XR). The aldose reductase may be any aldose reductase that is suitable for the host cells and the methods described herein, such as a naturally occurring aldose reductase or a variant thereof that retains aldose reductase activity. In one embodiment, the aldose reductase is present in the cytosol of the host cells.

[0206] In some embodiments, the host cells or fermenting organisms comprising a heterologous polynucleotide encoding an aldose reductase (AR) have an increased level of aldose reductase activity compared to the host cells without the heterokogous polynucleotide encoding the aldose reductase, when cultivated under the same conditions. In some embodiments, the host cells have an increased level of aldose reductase activity of at least 5%, e.g., at least 10%, at least 15%, at least 20%, at least 25%, at least 50%, at least 100%, at least 150%, at least 200%, at least 300%, or at 500% compared to the host cells without the heterologous polynucleotide encoding the aldose reductase, when cultivated under the same conditions.

[0207] Exemplary aldose reductases (ARs) that can be used with the host cells and fermenting organisms, and methods of use described herein include, but are not limited to, the Aspergillus niger aldose reductase of SEQ ID NO: 281, the Aspergillus oryzae aldose reductase of SEQ ID NO: 282, the Magnaporthe oryzae aldose reductase of SEQ ID NO: 283, the Meyerozyma guilliermondii aldose reductase of SEQ ID NO: 284 and the Scheffersomyces stipitis aldose reductase of SEQ ID NO: 285. Additional polynucleotides encoding suitable aldose reductase may be obtained from microorganisms of any genus, including those readily available within the UniProtKB database. In one embodiment, the aldose reductase is a bacterial, a yeast, or a filamentous fungal aldose reductase, e.g., obtained from any of the microorganisms described or referenced herein, as described supra.

[0208] The aldose reductase (AR) coding sequences can also be used to design nucleic acid probes to identify and clone DNA encoding aldose reductases from strains of different genera or species, as described supra.

[0209] The polynucleotides encoding the aldose reductases (ARs) may also be identified and obtained from other sources including microorganisms isolated from nature (e.g., soil, composts, water, etc.) or DNA samples obtained directly from natural materials (e.g., soil, composts, water, etc.) as described supra.

[0210] Techniques used to isolate or clone polynucleotides encoding aldose reductases (ARs) are described supra.

[0211] In one embodiment, the aldose reductase (AR) has a mature polypeptide sequence of at least 60%, e.g., at least 65%, at least 70%, at least 75%, at least 80%, at least 85%, at least 90%, at least 91%, at least 92%, at least 93%, at least 94%, at least 95%, at least 96%, at least 97%, at least 98%, at least 99%, or 100% sequence identity to any aldose reductase described or referenced herein (e.g., the aldose reductase of SEQ ID NO: 281, 282, 283, 284 or 285). In one embodiment, the aldose reductase has a mature polypeptide sequence that differs by no more than ten amino acids, e.g., by no more than five amino acids, by no more than four amino acids, by no more than three amino acids, by no more than two amino acids, or by one amino acid from any aldose reductase described or referenced herein (e.g., the aldose reductase of SEQ ID NO: 281, 282, 283, 284 or 285). In one embodiment, the aldose reductase has a mature polypeptide sequence that comprises or consists of the amino acid sequence of any aldose reductase described or referenced herein (e.g., the aldose reductase of SEQ ID NO: 281, 282, 283, 284 or 285), allelic variant, or a fragment thereof having aldose reductase activity. In one embodiment, the aldose reductase has an amino acid substitution, deletion, and/or insertion of one or more (e.g., two, several) amino acids. In some embodiments, the total number of amino acid substitutions, deletions and/or insertions is not more than 10, e.g., not more than 9, 8, 7, 6, 5, 4, 3, 2, or 1.

[0212] In some embodiments, the aldose reductase (AR) has at least 20%, e.g., at least 40%, at least 50%, at least 60%, at least 70%, at least 80%, at least 90%, at least 95%, at least 96%, at least 97%, at least 98%, at least 99%, or 100% of the aldose reductase activity of any aldose reductase described or referenced herein (e.g., the aldose reductase of SEQ ID NO: 281, 282, 283, 284 or 285) under the same conditions.

[0213] In one embodiment, the aldose reductase (AR) coding sequence hybridizes under at least low stringency conditions, e.g., medium stringency conditions, medium-high stringency conditions, high stringency conditions, or very high stringency conditions with the full-length complementary strand of the coding sequence from any aldose reductase described or referenced herein (e.g., the aldose reductase of SEQ ID NO: 281, 282, 283, 284 or 285). In one embodiment, the aldose reductase coding sequence has at least 65%, e.g., at least 70%, at least 75%, at least 80%, at least 85%, at least 85%, at least 90%, at least 91%, at least 92%, at least 93%, at least 94%, at least 95%, at least 96%, at least 97%, at least 98%, at least 99%, or 100% sequence identity with the coding sequence from any aldose reductase described or referenced herein (e.g., the aldose reductase of SEQ ID NO: 281, 282, 283, 284, or 285).

[0214] In one embodiment, the heterologous polynucleotide encoding the aldose reductase (AR) comprises the coding sequence of any aldose reductase described or referenced herein (e.g., the aldose reductase of SEQ ID NO: 281, 282, 283, 284, or 285). In one embodiment, the heterologous polynucleotide encoding the aldose reductase comprises a subsequence of the coding sequence from any aldose reductase described or referenced herein, wherein the subsequence encodes a polypeptide having aldose reductase activity. In one embodiment, the number of nucleotides residues in the subsequence is at least 75%, e.g., at least 80%, 85%, 90%, or 95% of the number of the referenced coding sequence.

[0215] The aldose reductases (ARs) can also include fused polypeptides or cleavable fusion polypeptides, as described supra.

[0216] In one embodiment, the host cell or fermenting organism (e.g., yeast cell) further comprises a heterologous polynucleotide encoding an L-arabinitol 4-dehydrogenase (LAD). A L-arabinitol 4-dehydrogenase, as used herein, provides enzymatic activity for converting L-arabitol to L-xylulose. The L-arabinitol 4-dehydrogenase may be any L-arabinitol 4-dehydrogenase that is suitable for the host cells and the methods described herein, such as a naturally occurring L-arabinitol 4-dehydrogenase or a variant thereof that retains L-arabinitol 4-dehydrogenase activity. In one embodiment, the L-arabinitol 4-dehydrogenase is present in the cytosol of the host cells.

[0217] In some embodiments, the host cells or fermenting organisms comprising a heterologous polynucleotide encoding a L-arabinitol 4-dehydrogenase (LAD) have an increased level of L-arabinitol 4-dehydrogenase activity compared to the host cells without the heterologous polynucleotide encoding the L-arabinitol 4-dehydrogenase, when cultivated under the same conditions. In some embodiments, the host cells have an increased level of L-arabinitol 4-dehydrogenase activity of at least 5%, e.g., at least 10%, at least 15%, at least 20%, at least 25%, at least 50%, at least 100%, at least 150%, at least 200%, at least 300%, or at 500% compared to the host cells without the heterologous polynucleotide encoding the L-arabinitol 4-dehydrogenase, when cultivated under the same conditions.

[0218] Exemplary L-arabinitol 4-dehydrogenases (LADs) that can be used with the host cells and fermenting organisms, and methods of use described herein include, but are not limited to, the Meyerozyma caribbica LAD of SEQ ID NO: 286, the Trichoderma reesei LAD of SEQ ID NO: 287, the Meyerozyma guilliermondii LAD of SEQ ID NO: 288, the Candida arabinofermentans LAD of SEQ ID NO: 289, the Candida carpophila LAD of SEQ ID NO: 290, the Talaromyces emersonii LAD of SEQ ID NO: 291, the Aspergillus oryzae LAD of SEQ ID NO: 292, the Neurospora crassa LAD of SEQ ID NO: 293, the Trichoderma reesei LAD of SEQ ID NO: 294, the Aspergillus niger LAD of SEQ ID NO: 295 and the Penicillium rubens LAD of SEQ ID NO: 296. Additional polynucleotides encoding suitable L-arabinitol 4-dehydrogenases may be obtained from microorganisms of any genus, including those readily available within the UniProtKB database. In one embodiment, the L-arabinitol 4-dehydrogenase is a bacterial, a yeast, or a filamentous fungal L-arabinitol 4-dehydrogenase, e.g., obtained from any of the microorganisms described or referenced herein, as described supra.

[0219] The L-arabinitol 4-dehydrogenase (LAD) coding sequences can also be used to design nucleic acid probes to identify and clone DNA encoding L-arabinitol 4-dehydrogenases from strains of different genera or species, as described supra.

[0220] The polynucleotides encoding L-arabinitol 4-dehydrogenases (LADs) may also be identified and obtained from other sources including microorganisms isolated from nature (e.g., soil, composts, water, etc.) or DNA samples obtained directly from natural materials (e.g., soil, composts, water, etc.) as described supra.

[0221] Techniques used to isolate or clone polynucleotides encoding L-arabinitol 4-dehydrogenases (LADs) are described supra.

[0222] In one embodiment, the L-arabinitol 4-dehydrogenase (LAD) has a mature polypeptide sequence of at least 60%, e.g., at least 65%, at least 70%, at least 75%, at least 80%, at least 85%, at least 90%, at least 91%, at least 92%, at least 93%, at least 94%, at least 95%, at least 96%, at least 97%, at least 98%, at least 99%, or 100% sequence identity to any L-arabinitol 4-dehydrogenase described or referenced herein (e.g., the L-arabinitol 4-dehydrogenase of SEQ ID NO: 286, 287, 288, 289, 290, 291, 292, 293, 294, 295 or 296). In one embodiment, the L-arabinitol 4-dehydrogenase has a mature polypeptide sequence that differs by no more than ten amino acids, e.g., by no more than five amino acids, by no more than four amino acids, by no more than three amino acids, by no more than two amino acids, or by one amino acid from any L-arabinitol 4-dehydrogenase described or referenced herein (e.g., the L-arabinitol 4-dehydrogenase of SEQ ID NO: 286, 287, 288, 289, 290, 291, 292, 293, 294, 295 or 296). In one embodiment, the L-arabinitol 4-dehydrogenase has a mature polypeptide sequence that comprises or consists of the amino acid sequence of any L-arabinitol 4-dehydrogenase described or referenced herein (e.g., the L-arabinitol 4-dehydrogenase of SEQ ID NO: 286, 287, 288, 289, 290, 291, 292, 293, 294, 295 or 296), allelic variant, or a fragment thereof having L-arabinitol 4-dehydrogenase activity. In one embodiment, the L-arabinitol 4-dehydrogenase has an amino acid substitution, deletion, and/or insertion of one or more (e.g., two, several) amino acids. In some embodiments, the total number of amino acid substitutions, deletions and/or insertions is not more than 10, e.g., not more than 9, 8, 7, 6, 5, 4, 3, 2, or 1.

[0223] In some embodiments, the L-arabinitol 4-dehydrogenase (LAD) has at least 20%, e.g., at least 40%, at least 50%, at least 60%, at least 70%, at least 80%, at least 90%, at least 95%, at least 96%, at least 97%, at least 98%, at least 99%, or 100% of the L-arabinitol 4-dehydrogenase activity of any L-arabinitol 4-dehydrogenase described or referenced herein (e.g., the L-arabinitol 4-dehydrogenase of SEQ ID NO: 286, 287, 288, 289, 290, 291, 292, 293, 294, 295 or 296) under the same conditions.

[0224] In one embodiment, the L-arabinitol 4-dehydrogenase (LAD) coding sequence hybridizes under at least low stringency conditions, e.g., medium stringency conditions, medium-high stringency conditions, high stringency conditions, or very high stringency conditions with the full-length complementary strand of the coding sequence from any L-arabinitol 4-dehydrogenase described or referenced herein (e.g., the L-arabinitol 4-dehydrogenase of SEQ ID NO: 286, 287, 288, 289, 290, 291, 292, 293, 294, 295 or 296). In one embodiment, the L-arabinitol 4-dehydrogenase coding sequence has at least 65%, e.g., at least 70%, at least 75%, at least 80%, at least 85%, at least 85%, at least 90%, at least 91%, at least 92%, at least 93%, at least 94%, at least 95%, at least 96%, at least 97%, at least 98%, at least 99%, or 100% sequence identity with the coding sequence from any L-arabinitol 4-dehydrogenase described or referenced herein (e.g., the L-arabinitol 4-dehydrogenase of SEQ ID NO: 286, 287, 288, 289, 290, 291, 292, 293, 294, 295 or 296).

[0225] In one embodiment, the heterologous polynucleotide encoding the L-arabinitol 4-dehydrogenase (LAD) comprises the coding sequence of any L-arabinitol 4-dehydrogenase described or referenced herein (e.g., the L-arabinitol 4-dehydrogenase of SEQ ID NO: 286, 287, 288, 289, 290, 291, 292, 293, 294, 295 or 296). In one embodiment, the heterologous polynucleotide encoding the L-arabinitol 4-dehydrogenase comprises a subsequence of the coding sequence from any L-arabinitol 4-dehydrogenase described or referenced herein, wherein the subsequence encodes a polypeptide having L-arabinitol 4-dehydrogenase activity. In one embodiment, the number of nucleotides residues in the subsequence is at least 75%, e.g., at least 80%, 85%, 90%, or 95% of the number of the referenced coding sequence.

[0226] The L-arabinitol 4-dehydrogenases (LADs) can also include fused polypeptides or cleavable fusion polypeptides, as described supra.

[0227] In one embodiment, the host cell or fermenting organism (e.g., yeast cell) further comprises a heterologous polynucleotide encoding a xylitol dehydrogenase (XDH). A xylitol dehydrogenase, as used herein, provides enzymatic activity for converting xylitol to D-xylulose. The xylitol dehydrogenase may be any xylitol dehydrogenase that is suitable for the host cells and the methods described herein, such as a naturally occurring xylitol dehydrogenase or a variant thereof that retains xylitol dehydrogenase activity. In one embodiment, the xylitol dehydrogenase is present in the cytosol of the host cells.

[0228] In some embodiments, the host cells or fermenting organisms comprising a heterologous polynucleotide encoding a xylitol dehydrogenase (XDH) have an increased level of xylitol dehydrogenase activity compared to the host cells without the heterologous polynucleotide encoding the xylitol dehydrogenase, when cultivated under the same conditions. In some embodiments, the host cells have an increased level of xylitol dehydrogenase activity of at least 5%, e.g., at least 10%, at least 15%, at least 20%, at least 25%, at least 50%, at least 100%, at least 150%, at least 200%, at least 300%, or at 500% compared to the host cells without the heterologous polynucleotide encoding the xylitol dehydrogenase, when cultivated under the same conditions.

[0229] Exemplary xylitol dehydrogenases (XDHs) that can be used with the host cells and fermenting organisms, and methods of use described herein include, but are not limited to, the Scheffersomyces stipitis xylitol dehydrogenase of SEQ ID NO: 309, the Trichoderma reesei xylitol dehydrogenase (Wang et al., 1998, Chin. J. Biotechnol. 14, 179-185), the Pichia stipitis xylitol dehydrogenase (Karhumaa et al, 2007, Microb Cell Fact. 6, 5), as well as other yeast xylitol dehydrogenases described in the art, such as XDHs from S. cerevisiae (Richard et. al., 1999, FEBS Letters 457, 135-138), C. didensiae, C. intermediae, C. parapsilosis, C. silvanoru, C. tropicalis, KI. Marxsianus, P. guilliermondii, T. molishiama, Pa. tannophilus, and C. shehatae (Yablochkova et al, 2003, Microbiology 72(4), 414-417). Additional polynucleotides encoding suitable xylitol dehydrogenases may be obtained from microorganisms of any genus, including those readily available within the UniProtKB database. In one embodiment, the xylitol dehydrogenase is a bacterial, a yeast, or a filamentous fungal xylitol dehydrogenase, e.g., obtained from any of the microorganisms described or referenced herein, as described supra.

[0230] The xylitol dehydrogenase (XDH) coding sequences can also be used to design nucleic acid probes to identify and clone DNA encoding xylitol dehydrogenases from strains of different genera or species, as described supra.

[0231] The polynucleotides encoding xylitol dehydrogenases (XDHs) may also be identified and obtained from other sources including microorganisms isolated from nature (e.g., soil, composts, water, etc.) or DNA samples obtained directly from natural materials (e.g., soil, composts, water, etc.) as described supra.

[0232] Techniques used to isolate or clone polynucleotides encoding xylitol dehydrogenases (XDHs) are described supra.

[0233] In one embodiment, the xylitol dehydrogenase (XDH) has a mature polypeptide sequence of at least 60%, e.g., at least 65%, at least 70%, at least 75%, at least 80%, at least 85%, at least 90%, at least 91%, at least 92%, at least 93%, at least 94%, at least 95%, at least 96%, at least 97%, at least 98%, at least 99%, or 100% sequence identity to any xylitol dehydrogenase described or referenced herein (e.g., the Scheffersomyces stipitis xylitol dehydrogenase of SEQ ID NO: 309). In one embodiment, the xylitol dehydrogenase has a mature polypeptide sequence that differs by no more than ten amino acids, e.g., by no more than five amino acids, by no more than four amino acids, by no more than three amino acids, by no more than two amino acids, or by one amino acid from any xylitol dehydrogenase described or referenced herein (e.g., the Scheffersomyces stipitis xylitol dehydrogenase of SEQ ID NO: 309). In one embodiment, the xylitol dehydrogenase has a mature polypeptide sequence that comprises or consists of the amino acid sequence of any xylitol dehydrogenase described or referenced herein (e.g., the Scheffersomyces stipitis xylitol dehydrogenase of SEQ ID NO: 309), allelic variant, or a fragment thereof having xylitol dehydrogenase activity.

[0234] In one embodiment, the xylitol dehydrogenase has an amino acid substitution, deletion, and/or insertion of one or more (e.g., two, several) amino acids. In some embodiments, the total number of amino acid substitutions, deletions and/or insertions is not more than 10, e.g., not more than 9, 8, 7, 6, 5, 4, 3, 2, or 1.

[0235] In some embodiments, the xylitol dehydrogenase (XDH) has at least 20%, e.g., at least 40%, at least 50%, at least 60%, at least 70%, at least 80%, at least 90%, at least 95%, at least 96%, at least 97%, at least 98%, at least 99%, or 100% of the xylitol dehydrogenase activity of any xylitol dehydrogenase described or referenced herein (e.g., the Scheffersomyces stipitis xylitol dehydrogenase of SEQ ID NO: 309) under the same conditions.

[0236] In one embodiment, the xylitol dehydrogenase (XDH) coding sequence hybridizes under at least low stringency conditions, e.g., medium stringency conditions, medium-high stringency conditions, high stringency conditions, or very high stringency conditions with the full-length complementary strand of the coding sequence from any xylitol dehydrogenase described or referenced herein (e.g., the Scheffersomyces stipitis xylitol dehydrogenase of SEQ ID NO: 309). In one embodiment, the xylitol dehydrogenase coding sequence has at least 65%, e.g., at least 70%, at least 75%, at least 80%, at least 85%, at least 85%, at least 90%, at least 91%, at least 92%, at least 93%, at least 94%, at least 95%, at least 96%, at least 97%, at least 98%, at least 99%, or 100% sequence identity with the coding sequence from any xylitol dehydrogenase described or referenced herein (e.g., the Scheffersomyces stipitis xylitol dehydrogenase of SEQ ID NO: 309).

[0237] In one embodiment, the heterologous polynucleotide encoding the xylitol dehydrogenase (XDH) comprises the coding sequence of any xylitol dehydrogenase described or referenced herein (e.g., the Scheffersomyces stipitis xylitol dehydrogenase of SEQ ID NO: 309). In one embodiment, the heterologous polynucleotide encoding the xylitol dehydrogenase comprises a subsequence of the coding sequence from any xylitol dehydrogenase described or referenced herein, wherein the subsequence encodes a polypeptide having xylitol dehydrogenase activity. In one embodiment, the number of nucleotides residues in the subsequence is at least 75%, e.g., at least 80%, 85%, 90%, or 95% of the number of the referenced coding sequence.

[0238] The xylitol dehydrogenases (XDHs) can also include fused polypeptides or cleavable fusion polypeptides, as described supra.

[0239] In one embodiment, the host cell or fermenting organism (e.g., yeast cell) further comprises a heterologous polynucleotide encoding a xylulokinase (XK). A xylulokinase, as used herein, provides enzymatic activity for converting D-xylulose to xylulose 5-phosphate.

[0240] The xylulokinase may be any xylulokinase that is suitable for the host cells and the methods described herein, such as a naturally occurring xylulokinase or a variant thereof that retains xylulokinase activity. In one embodiment, the xylulokinase is present in the cytosol of the host cells.

[0241] In some embodiments, the host cells or fermenting organisms comprising a heterologous polynucleotide encoding a xylulokinase (XK) have an increased level of xylulokinase activity compared to the host cells without the heterologous polynucleotide encoding the xylulokinase, when cultivated under the same conditions. In some embodiments, the host cells have an increased level of xylulokinase activity of at least 5%, e.g., at least 10%, at least 15%, at least 20%, at least 25%, at least 50%, at least 100%, at least 150%, at least 200%, at least 300%, or at 500% compared to the host cells without the heterologous polynucleotide encoding the xylulokinase, when cultivated under the same conditions.

[0242] Exemplary xylulokinases (XKs) that can be used with the host cells and fermenting organisms, and methods of use described herein include, but are not limited to, the Saccharomyces cerevisiae xylulokinase of SEQ ID NO: 75, the Scheffersomyces stipitis xylulokinase of SEQ ID NO: 310 and the Aspergillus niger xylulokinase of SEQ ID NO: 311.

[0243] Additional xylulokinases are known in the art. Additional polynucleotides encoding suitable xylulokinases may be obtained from microorganisms of any genus, including those readily available within the UniProtKB database. In one embodiment, the xylulokinases is a bacterial, a yeast, or a filamentous fungal xylulokinase, e.g., obtained from any of the microorganisms described or referenced herein, as described supra.

[0244] The xylulokinase (XK) coding sequences can also be used to design nucleic acid probes to identify and clone DNA encoding xylulokinases from strains of different genera or species, as described supra.

[0245] The polynucleotides encoding xylulokinases (XK) may also be identified and obtained from other sources including microorganisms isolated from nature (e.g., soil, composts, water, etc.) or DNA samples obtained directly from natural materials (e.g., soil, composts, water, etc.) as described supra.

[0246] Techniques used to isolate or clone polynucleotides encoding xylulokinases (XKs) are described supra.

[0247] In one embodiment, the xylulokinase (XK) has a mature polypeptide sequence of at least 60%, e.g., at least 65%, at least 70%, at least 75%, at least 80%, at least 85%, at least 90%, at least 91%, at least 92%, at least 93%, at least 94%, at least 95%, at least 96%, at least 97%, at least 98%, at least 99%, or 100% sequence identity to any xylulokinase described or referenced herein (e.g., the xylulokinase of SEQ ID NO: 75, 310 or 311). In one embodiment, the xylulokinase has a mature polypeptide sequence that differs by no more than ten amino acids, e.g., by no more than five amino acids, by no more than four amino acids, by no more than three amino acids, by no more than two amino acids, or by one amino acid from any xylulokinase described or referenced herein (e.g., the xylulokinase of SEQ ID NO: 75, 310 or 311). In one embodiment, the xylulokinase has a mature polypeptide sequence that comprises or consists of the amino acid sequence of any xylulokinase described or referenced herein (e.g., the xylulokinase of SEQ ID NO: 75, 310 or 311), allelic variant, or a fragment thereof having xylulokinase activity. In one embodiment, the xylulokinase has an amino acid substitution, deletion, and/or insertion of one or more (e.g., two, several) amino acids. In some embodiments, the total number of amino acid substitutions, deletions and/or insertions is not more than 10, e.g., not more than 9, 8, 7, 6, 5, 4, 3, 2, or 1.

[0248] In some embodiments, the xylulokinase (XK) has at least 20%, e.g., at least 40%, at least 50%, at least 60%, at least 70%, at least 80%, at least 90%, at least 95%, at least 96%, at least 97%, at least 98%, at least 99%, or 100% of the xylulokinase activity of any xylulokinase described or referenced herein (e.g., the xylulokinase of SEQ ID NO: 75, 310 or 311) under the same conditions.

[0249] In one embodiment, the xylulokinase (XK) coding sequence hybridizes under at least low stringency conditions, e.g., medium stringency conditions, medium-high stringency conditions, high stringency conditions, or very high stringency conditions with the full-length complementary strand of the coding sequence from any xylulokinase described or referenced herein (e.g., the xylulokinase of SEQ ID NO: 75, 310 or 311). In one embodiment, the xylulokinase coding sequence has at least 65%, e.g., at least 70%, at least 75%, at least 80%, at least 85%, at least 85%, at least 90%, at least 91%, at least 92%, at least 93%, at least 94%, at least 95%, at least 96%, at least 97%, at least 98%, at least 99%, or 100% sequence identity with the coding sequence from any xylulokinase described or referenced herein (e.g., the xylulokinase of SEQ ID NO: 75, 310 or 311).

[0250] In one embodiment, the heterologous polynucleotide encoding the xylulokinase (XK) comprises the coding sequence of any xylulokinase described or referenced herein (e.g., the xylulokinase of SEQ ID NO: 75, 310 or 311). In one embodiment, the heterologous polynucleotide encoding the xylulokinase comprises a subsequence of the coding sequence from any xylulokinase described or referenced herein, wherein the subsequence encodes a polypeptide having xylulokinase activity. In one embodiment, the number of nucleotides residues in the subsequence is at least 75%, e.g., at least 80%, 85%, 90%, or 95% of the number of the referenced coding sequence.

[0251] The xylulokinases (XKs) can also include fused polypeptides or cleavable fusion polypeptides, as described supra.

[0252] In some embodiments, the host cells or fermenting organisms described herein have an active arabinose fermentation pathway known as the “bacterial pathway” shown in FIG. 1 which utilizes genes L-arabinose isomerase (AI, such as araA), L-ribulokinase (RK, such as araB), and L-ribulose-5-P4-epimerase (R5PE, such as araD) to convert L-arabinose to D-xylulose 5-phosphate. This and other exemplary arabinose fermentation pathways are known in the art (e.g., WO2002/066616; WO2003/095627; WO2007/143245; WO2008/041840; WO2009/011591; WO2010/151548; WO2011/003893; WO2011/131674; WO2012/143513; US2012/225464; U.S. Pat. No. 7,977,083). Any arabinose fermentation pathway or gene thereof described in the foregoing references is incorporated herein by reference for use in Applicant's active arabinose fermentation pathway.

[0253] In one aspect, the recombinant cells described herein (e.g., a cell comprising a heterologous polynucleotide encoding a L-xylulose reductase described herein) have improved anaerobic growth on a pentose (e.g., xylose and/or arabinose). In one embodiment, the recombinant cell is capable of higher anaerobic growth rate on a pentose (e.g., xylose and/or arabinose) compared to the same cell without the heterologous polynucleotide encoding L-xylulose reductase (e.g., under conditions described in the examples herein). In one embodiment, the recombinant cell is capable of higher anaerobic growth rate on pentose (e.g., xylose and/or arabinose) compared to the same cell encoding the L-xylulose reductase (LXR) of SEQ ID NO: 305 (e.g., under conditions described in the examples herein).

[0254] In one aspect, the recombinant cells described herein (e.g., a cell comprising a heterologous polynucleotide encoding a L-xylulose reductase described herein) have improved rate of pentose consumption (e.g., xylose and/or arabinose). In one embodiment, the recombinant cell is capable of higher rate of pentose consumption (e.g., xylose and/or arabinose) compared to the same cell without the heterologous polynucleotide encoding a L-xylulose reductase (e.g., under conditions described in the examples herein). In one embodiment, the rate of pentose consumption (e.g., xylose and/or arabinose) is at least 5%, e.g., at least 10%, 15%, 20%, 25%, 30%, 35%, 40%, 45%, 50%, 60%, 75% or 90% higher compared to the same cell without the heterologous polynucleotide encoding a L-xylulose reductase (e.g., under conditions described in the examples herein). In one embodiment, the cell is capable of a higher rate of pentose consumption (e.g., at least 5%, 10%, 15%, 20%, 25%, 30%, 35%, 40%, 45%, 50%, 60%, 75% or 90% higher xylose and/or arabinose consumption) compared to the same cell encoding the L-xylulose reductase (LXR) of SEQ ID NO: 305 (e.g., under conditions described in the examples herein).

[0255] In one aspect, the recombinant cells described herein (e.g., a cell comprising a heterologous polynucleotide encoding a L-xylulose reductase described herein) have higher pentose (e.g., xylose and/or arabinose) consumption. In one embodiment, the recombinant cell is capable of higher pentose (e.g., xylose and/or arabinose) consumption compared to the same cell without the heterologous polynucleotide encoding a L-xylulose reductase at about or after 120 hours fermentation (e.g., under conditions described in the examples herein). In one embodiment, the recombinant cell is capable of consuming more than 65%, e.g., at least 70%, 75%, 80%, 85%, 90%, 95% of pentose (e.g., xylose and/or arabinose) in the medium at about or after 120 hours fermentation (e.g., under conditions described in the examples herein). In one embodiment, the recombinant cell is capable of higher pentose consumption (e.g., xylose and/or arabinose) compared to the same cell encoding the L-xylulose reductase (LXR) of SEQ ID NO: 305 at about or after 120 hours fermentation (e.g., under conditions described in the examples herein).

### Active Xylose Fermentation Pathway

[0256] The host cells or fermenting organisms described herein (e.g., yeast cells) may comprise an active xylose fermentation pathway. Exemplary xylose fermentation pathways are known in the art (e.g., WO2003/062430, WO2003/078643, WO2004/067760, WO02006/096130, WO02009/017441, WO02010/059095, WO2011/059329, WO02011/123715, WO02012/113120, WO02012/135110, WO2013/081700, WO02018/112638 and US2017/088866). Any xylose fermentation pathway or gene thereof described in the foregoing references is incorporated herein by reference for use in Applicant's active xylose fermentation pathway. FIG. 4 shows conversion of D-xylose to D-xylulose 5-phosphate, which is then fermented to ethanol via the pentose phosphate pathway. The oxido-reductase pathway uses an aldolase reductase (AR, such as xylose reductase (XR)) to reduce D-xylose to xylitol followed by oxidation of xylitol to D-xylulose with xylitol dehydrogenase (XDH; also known as D-xylulose reductase). The isomerase pathway uses xylose isomerase (XI) to convert D-xylose into D-xylulose. D-xylulose is then converted to D-xylulose-5-phosphate with xylulokinase (XK). The active xylose fermentation pathway may utilize one or more of the same enzymes of an active arabinose fermentation pathway (e.g., AR, XDH, XK).

[0257] In one embodiment, the host cell or fermenting organism (e.g., yeast cell) further comprises a heterologous polynucleotide encoding a xylose isomerase (XI). The xylose isomerase may be any xylose isomerase that is suitable for the host cells and the methods described herein, such as a naturally occurring xylose isomerase or a variant thereof that retains xylose isomerase activity. In one embodiment, the xylose isomerase is present in the cytosol of the host cells.

[0258] In some embodiments, the host cell or fermenting organism comprising a heterologous polynucleotide encoding a xylose isomerase has an increased level of xylose isomerase activity compared to the host cells without the heterologous polynucleotide encoding the xylose isomerase, when cultivated under the same conditions. In some embodiments, the host cells or fermenting organisms have an increased level of xylose isomerase activity of at least 5%, e.g., at least 10%, at least 15%, at least 20%, at least 25%, at least 50%, at least 100%, at least 150%, at least 200%, at least 300%, or at 500% compared to the host cells without the heterologous polynucleotide encoding the xylose isomerase, when cultivated under the same conditions.

[0259] Exemplary xylose isomerases that can be used with the recombinant host cells and methods of use described herein include, but are not limited to, XIs from the fungus Piromyces sp. (WO2003/062430) or other sources (Madhavan et al., 2009, Appl Microbiol Biotechnol. 82(6), 1067-1078) have been expressed in S. cerevisiae host cells. Still other XIs suitable for expression in yeast have been described in US 2012/0184020 (an XI from Ruminococcus flavefaciens), WO02011/078262 (several XIs from Reticulitermes speratus and Mastotermes darwiniensis) and WO02012/009272 (constructs and fungal cells containing an XI from Abiotrophia defectiva). U.S. Pat. No. 8,586,336 describes a S. cerevisiae host cell expressing an XI obtained by bovine rumen fluid (shown herein as SEQ ID NO: 74).

[0260] Additional polynucleotides encoding suitable xylose isomerases may be obtained from microorganisms of any genus, including those readily available within the UniProtKB database. In one embodiment, the xylose isomerase is a bacterial, a yeast, or a filamentous fungal xylose isomerase, e.g., obtained from any of the microorganisms described or referenced herein, as described supra.

[0261] The xylose isomerase coding sequences can also be used to design nucleic acid probes to identify and clone DNA encoding xylose isomerases from strains of different genera or species, as described supra.

[0262] The polynucleotides encoding xylose isomerases may also be identified and obtained from other sources including microorganisms isolated from nature (e.g., soil, composts, water, etc.) or DNA samples obtained directly from natural materials (e.g., soil, composts, water, etc.) as described supra.

[0263] Techniques used to isolate or clone polynucleotides encoding xylose isomerases are described supra.

[0264] In one embodiment, the xylose isomerase has a mature polypeptide sequence of having at least 60%, e.g., at least 65%, at least 70%, at least 75%, at least 80%, at least 85%, at least 90%, at least 91%, at least 92%, at least 93%, at least 94%, at least 95%, at least 96%, at least 97%, at least 98%, at least 99%, or 100% sequence identity to any xylose isomerase described or referenced herein (e.g., the xylose isomerase of SEQ ID NO: 74). In one embodiment, the xylose isomerase has a mature polypeptide sequence that differs by no more than ten amino acids, e.g., by no more than five amino acids, by no more than four amino acids, by no more than three amino acids, by no more than two amino acids, or by one amino acid from any xylose isomerase described or referenced herein (e.g., the xylose isomerase of SEQ ID NO: 74). In one embodiment, the xylose isomerase has a mature polypeptide sequence that comprises or consists of the amino acid sequence of any xylose isomerase described or referenced herein (e.g., the xylose isomerase of SEQ ID NO: 74), allelic variant, or a fragment thereof having xylose isomerase activity. In one embodiment, the xylose isomerase has an amino acid substitution, deletion, and/or insertion of one or more (e.g., two, several) amino acids. In some embodiments, the total number of amino acid substitutions, deletions and/or insertions is not more than 10, e.g., not more than 9, 8, 7, 6, 5, 4, 3, 2, or 1.

[0265] In some embodiments, the xylose isomerase has at least 20%, e.g., at least 40%, at least 50%, at least 60%, at least 70%, at least 80%, at least 90%, at least 95%, at least 96%, at least 97%, at least 98%, at least 99%, or 100% of the xylose isomerase activity of any xylose isomerase described or referenced herein (e.g., the xylose isomerase of SEQ ID NO: 74) under the same conditions.

[0266] In one embodiment, the xylose isomerase coding sequence hybridizes under at least low stringency conditions, e.g., medium stringency conditions, medium-high stringency conditions, high stringency conditions, or very high stringency conditions with the full-length complementary strand of the coding sequence from any xylose isomerase described or referenced herein (e.g., the xylose isomerase of SEQ ID NO: 74). In one embodiment, the xylose isomerase coding sequence has at least 65%, e.g., at least 70%, at least 75%, at least 80%, at least 85%, at least 85%, at least 90%, at least 91%, at least 92%, at least 93%, at least 94%, at least 95%, at least 96%, at least 97%, at least 98%, at least 99%, or 100% sequence identity with the coding sequence from any xylose isomerase described or referenced herein (e.g., the xylose isomerase of SEQ ID NO: 74).

[0267] In one embodiment, the heterologous polynucleotide encoding the xylose isomerase comprises the coding sequence of any xylose isomerase described or referenced herein (e.g., the xylose isomerase of SEQ ID NO: 74). In one embodiment, the heterologous polynucleotide encoding the xylose isomerase comprises a subsequence of the coding sequence from any xylose isomerase described or referenced herein, wherein the subsequence encodes a polypeptide having xylose isomerase activity. In one embodiment, the number of nucleotides residues in the subsequence is at least 75%, e.g., at least 80%, 85%, 90%, or 95% of the number of the referenced coding sequence.

[0268] The xylose isomerases can also include fused polypeptides or cleavable fusion polypeptides, as described supra.

[0269] The host cell or fermenting organism may also comprise an aldose reductase (AR), xylitol dehydrogenase (XDH) and/or xylulokinase (XK) as described supra.

[0270] In one embodiment, the host cell or fermenting organism (e.g., yeast cell) further comprises a heterologous polynucleotide encoding a ribulose 5 phosphate 3-epimerase (RPE1). A ribulose 5 phosphate 3-epimerase, as used herein, provides enzymatic activity for converting L-ribulose 5-phosphate to L-xylulose 5-phosphate (EC 5.1.3.22). The RPE1 may be any RPE1 that is suitable for the host cells and the methods described herein, such as a naturally occurring RPE1 or a variant thereof that retains RPE1 activity. In one embodiment, the RPE1 is present in the cytosol of the host cells.

[0271] In one embodiment, the recombinant cell comprises a heterologous polynucleotide encoding a ribulose 5 phosphate 3-epimerase (RPE1), wherein the RPE1 is Saccharomyces cerevisiae RPE1, or an RPE1 having at least 60%, e.g., at least 65%, 70%, 75%, 80%, 85%, 90%, 95%, 97%, 98%, 99%, or 100% sequence identity to a Saccharomyces cerevisiae RPE1.

[0272] In one embodiment, the host cell or fermenting organism (e.g., yeast cell) further comprises a heterologous polynucleotide encoding a ribulose 5 phosphate isomerase (RKI1).

[0273] A ribulose 5 phosphate isomerase, as used herein, provides enzymatic activity for converting ribose-5-phophate to ribulose 5-phosphate. The RKI1 may be any RKI1 that is suitable for the host cells and the methods described herein, such as a naturally occurring RKI1 or a variant thereof that retains RKI1 activity. In one embodiment, the RKI1 is present in the cytosol of the host cells.

[0274] In one embodiment, the host cell or fermenting organism comprises a heterologous polynucleotide encoding a ribulose 5 phosphate isomerase (RKI1), wherein the RKI1 is a Saccharomyces cerevisiae RKI1, or an RKI1 having a mature polypeptide sequence of at least 60%, e.g., at least 65%, 70%, 75%, 80%, 85%, 90%, 95%, 97%, 98%, 99%, or 100% sequence identity to a Saccharomyces cerevisiae RKI1.

[0275] In one embodiment, the host cell or fermenting organism (e.g., yeast cell) further comprises a heterologous polynucleotide encoding a transketolase (TKL1). The TKL1 may be any TKL1 that is suitable for the host cells and the methods described herein, such as a naturally occurring TKL1 or a variant thereof that retains TKL1 activity. In one embodiment, the TKL1 is present in the cytosol of the host cells.

[0276] In one embodiment, the host cell or fermenting organism comprises a heterologous polynucleotide encoding a transketolase (TKL1), wherein the TKL1 is a Saccharomyces cerevisiae TKL1, or a TKL1 having a mature polypeptide sequence of at least 60%, e.g., at least 65%, 70%, 75%, 80%, 85%, 90%, 95%, 97%, 98%, 99%, or 100% sequence identity to a Saccharomyces cerevisiae TKL1.

[0277] In one embodiment, the host cell or fermenting organism (e.g., yeast cell) further comprises a heterologous polynucleotide encoding a transaldolase (TAL1). The TAL1 may be any TAL1 that is suitable for the host cells and the methods described herein, such as a naturally occurring TAL1 or a variant thereof that retains TAL1 activity. In one embodiment, the TAL1 is present in the cytosol of the host cells.

[0278] In one embodiment, the host cell or fermenting organism comprises a heterologous polynucleotide encoding a transketolase (TAL1), wherein the TAL1 is a Saccharomyces cerevisiae TAL1, or a TAL1 having a mature polypeptide sequence of at least 60%, e.g., at least 65%, 70%, 75%, 80%, 85%, 90%, 95%, 97%, 98%, 99%, or 100% sequence identity to a Saccharomyces cerevisiae TAL1.

### Non-Phosphorylating NADP-Dependent Glyceraldehyde-3-Phosphate Dehydrogenases (GAPNs)

[0279] The host cells and fermenting organisms may express a heterologous NADP-dependent glyceraldehyde-3-phosphate dehydrogenase (GAPN). The GAPN can be any GAPN that is suitable for the host cells and their methods of use described herein, such as a naturally occurring GAPN (e.g., an endogenous GAPN or a native GAPN from another species) or a variant thereof that retains GAPN activity. In one aspect, GAPN is present in the cytosol of the host cells.

[0280] In some embodiments, the host cell or fermenting organism comprises a heterologous polynucleotide encoding a GAPN. In some embodiments, the host cell or fermenting organism comprising a heterologous polynucleotide encoding a GAPN has an increased level of GAPN activity compared to the host cell or fermenting organism without the heterologous polynucleotide encoding the GAPN, when cultivated under the same conditions. In some embodiments, the host cell or fermenting organism has an increased level of GAPN activity of at least 5%, e.g., at least 10%, at least 15%, at least 20%, at least 25%, at least 50%, at least 100%, at least 150%, at least 200%, at least 300%, or at 500% compared to host cell or fermenting organism without the heterologous polynucleotide encoding the GAPN, when cultivated under the same conditions.

[0281] Exemplary GAPNs that may be expressed with the host cells or fermenting organisms and methods of use described herein include, but are not limited to, GAPNs shown in Table 3 (or derivatives thereof).

TABLE 3

| | Donor Organism | Sequence code | SEQ ID NO. |
|---|---|---|---|
| 1 | Triticum aestivum | Q8LK61 | 262 |
| 2 | Chlamydomonas reinhardtii | A0A2K3D5S6 | 263 |
| 3 | Apium graveolens | Q9SNX8 | 264 |
| 4 | Cicer arietinum | A0A1S2YP36 | 265 |
| 5 | Bacillus pseudomycoides | A0A2C4I5G8 | 266 |
| 6 | Streptococcus equinus | Q3C1A6 | 267 |
| 7 | Glycine soja | A0A0B2QEZ3 | 268 |
| 8 | Streptococcus sp. DD12 | A0A139NKR4 | 269 |
| 9 | Bacillus thuringiensis | A0A0B5NZK7 | 270 |
| 10 | Arabidopsis thaliana | Q1WIQ6 | 271 |
| 11 | Bacillus litoralis | EFP8C9GVR | 272 |
| 12 | Streptococcus hyointestinalis | A0A380K8A8 | 273 |
| 13 | Zea mays | Q43272 | 274 |
| 14 | Lactobacillus delbrueckii | Q04A83 | 275 |
| 15 | Streptococcus pluranimalium | A0A2L0D390 | 276 |
| 16 | Nicotiana plumbaginifolia | P93338 | 277 |
| 17 | Streptococcus macacae | G5JUQ8 | 278 |
| 18 | Streptococcus mutans | Q59931 | 279 |
| 19 | Bacillus cereus | | 280 |

[0282] Additional polynucleotides encoding suitable GAPNs may be derived from microorganisms of any suitable genus, including those readily available within the UniProtKB database.

[0283] The GAPN coding sequences can also be used to design nucleic acid probes to identify and clone DNA encoding proteases from strains of different genera or species, as described supra.

[0284] The polynucleotides encoding GAPNs may also be identified and obtained from other sources including microorganisms isolated from nature (e.g., soil, composts, water, etc.) or DNA samples obtained directly from natural materials (e.g., soil, composts, water, etc.) as described supra.

[0285] Techniques used to isolate or clone polynucleotides encoding GAPNs are described supra.

[0286] In one embodiment, the GAPN has a mature polypeptide sequence that comprises or consists of the amino acid sequence of any one of SEQ ID NOs: 262-280 (e.g., any one of SEQ ID NOs: 262, 263, 264, 265, 266, 267, 268, 269, 270, 271, 272, 273, 274, 275, 276, 277, 278, 279 or 280). In another embodiment, the GAPN has a mature polypeptide sequence that is a fragment of the GAPN of any one of SEQ ID NOs: 262-280 (e.g., wherein the fragment has GAPN activity). In one embodiment, the number of amino acid residues in the fragment is at least 75%, e.g., at least 80%, 85%, 90%, or 95% of the number of amino acid residues in referenced full length GAPN (e.g. any one of SEQ ID NOs: 262-280). In other embodiments, the GAPN may comprise the catalytic domain of any GAPN described or referenced herein (e.g., the catalytic domain of any one of SEQ ID NOs: 262-280).

[0287] The GAPN may be a variant of any one of the GAPNs described supra (e.g., any one of SEQ ID NOs: 262-280). In one embodiment, the GAPN has a mature polypeptide sequence of at least 60%, e.g., at least 65%, 70%, 75%, 80%, 85%, 90%, 95%, 97%, 98%, 99%, or 100% sequence identity to any one of the GAPNs described supra (e.g., any one of SEQ ID NOs: 262-280).

[0288] Examples of suitable amino acid changes, such as conservative substitutions that do not significantly affect the folding and/or activity of the GAPN, are described supra.

[0289] In one embodiment, the GAPN has a mature polypeptide sequence that differs by no more than ten amino acids, e.g., by no more than five amino acids, by no more than four amino acids, by no more than three amino acids, by no more than two amino acids, or by one amino acid from the amino acid sequence of any one of the GAPN described supra (e.g., any one of SEQ ID NOs: 262-280). In one embodiment, the GAPN has an amino acid substitution, deletion, and/or insertion of one or more (e.g., two, several) of amino acid sequence of any one of the GAPNs described supra (e.g., any one of SEQ ID NOs: 262-280). In some embodiments, the total number of amino acid substitutions, deletions and/or insertions is not more than 10, e.g., not more than 9, 8, 7, 6, 5, 4, 3, 2, or 1.

[0290] In one embodiment, the GAPN coding sequence hybridizes under at least low stringency conditions, e.g., medium stringency conditions, medium-high stringency conditions, high stringency conditions, or very high stringency conditions with the full-length complementary strand of the coding sequence from any GAPN described or referenced herein (e.g., any one of SEQ ID NOs: 262-280). In one embodiment, the GAPN coding sequence has at least 65%, e.g., at least 70%, at least 75%, at least 80%, at least 85%, at least 85%, at least 90%, at least 91%, at least 92%, at least 93%, at least 94%, at least 95%, at least 96%, at least 97%, at least 98%, at least 99%, or 100% sequence identity with the coding sequence from any GAPN described or referenced herein (e.g., any one of SEQ ID NOs: 262-280).

[0291] In one embodiment, the GAPN comprises the coding sequence of any GAPN described or referenced herein (any one of SEQ ID NOs: 262-280). In one embodiment, the GAPN comprises a coding sequence that is a subsequence of the coding sequence from any GAPN described or referenced herein, wherein the subsequence encodes a polypeptide having GAPN activity. In one embodiment, the number of nucleotides residues in the subsequence is at least 75%, e.g., at least 80%, 85%, 90%, or 95% of the number of the referenced coding sequence.

[0292] The referenced GAPN coding sequence of any related aspect or embodiment described herein can be the native coding sequence or a degenerate sequence, such as a codon-optimized coding sequence designed for use in a particular host cell (e.g., optimized for expression in Saccharomyces cerevisiae).

[0293] The GAPN can also include fused polypeptides or cleavable fusion polypeptides, as described supra.

### Glucoamylases

[0294] The host cells and fermenting organisms may express a heterologous glucoamylase. The glucoamylase can be any glucoamylase that is suitable for the host cells, fermenting organisms and/or their methods of use described herein, such as a naturally occurring glucoamylase or a variant thereof that retains glucoamylase activity. Any glucoamylase contemplated for expression by a host cell or fermenting organism described below is also contemplated for embodiments of the invention involving exogenous addition of a glucoamylase (e.g., added before, during or after liquefaction and/or saccharification).

[0295] In some embodiments, the host cell or fermenting organism comprises a heterologous polynucleotide encoding a glucoamylase, for example, as described in WO2017/087330, the content of which is hereby incorporated by reference. Any glucoamylase described or referenced herein is contemplated for expression in the host cell or fermenting organism.

[0296] In some embodiments, the host cell or fermenting organism comprising a heterologous polynucleotide encoding a glucoamylase has an increased level of glucoamylase activity compared to the host cells without the heterologous polynucleotide encoding the glucoamylase, when cultivated under the same conditions. In some embodiments, the host cell or fermenting organism has an increased level of glucoamylase activity of at least 5%, e.g., at least 10%, at least 15%, at least 20%, at least 25%, at least 50%, at least 100%, at least 150%, at least 200%, at least 300%, or at 500% compared to the host cell or fermenting organism without the heterologous polynucleotide encoding the glucoamylase, when cultivated under the same conditions.

[0297] Exemplary glucoamylases that can be used with the host cells and/or the methods described herein include bacterial, yeast, or filamentous fungal glucoamylases, e.g., obtained from any of the microorganisms described or referenced herein, as described supra.

[0298] Preferred glucoamylases are of fungal or bacterial origin, selected from the group consisting of Aspergillus glucoamylases, in particular Aspergillus niger G1 or G2 glucoamylase (Boel et al. (1984), EMBO J. 3 (5), p. 1097-1102), or variants thereof, such as those disclosed in VO 92/00381, WO 00/04136 and WO 01/04273 (from Novozymes, Denmark); the A. awamori glucoamylase disclosed in WO 84/02921, Aspergillus oryzae glucoamylase (Agric. Biol. Chem. (1991), 55 (4), p. 941-949), or variants or fragments thereof. Other Aspergillus glucoamylase variants include variants with enhanced thermal stability: G137A and G139A (Chen et al. (1996), Prot. Eng. 9, 499-505); D257E and D293E/Q (Chen et al. (1995), Prot. Eng. 8, 575-582); N182 (Chen et al. (1994), Biochem. J. 301, 275-281); disulphide bonds, A246C (Fierobe et al. (1996), Biochemistry, 35, 8698-8704; and introduction of Pro residues in position A435 and S436 (Li et al. (1997), Protein Eng. 10, 1199-1204.

[0299] Other glucoamylases include Athelia rolfsii (previously denoted Corticium rolfsii) glucoamylase (see U.S. Pat. No. 4,727,026 and (Nagasaka et al. (1998) “Purification and properties of the raw-starch-degrading glucoamylases from Corticium rolfsii, Appl Microbiol Biotechnol 50:323-330), Talaromyces glucoamylases, in particular derived from Talaromyces emersonii(WO 99/28448), Talaromyces leycettanus (US patent no. Re. 32,153), Talaromyces duponti, Talaromyces thermophilus (U.S. Pat. No. 4,587,215). In one embodiment, the glucoamylase used during saccharification and/or fermentation is the Talaromyces emersonii glucoamylase disclosed in WO 99/28448 or the Talaromyces emersonii glucoamylase of SEQ ID NO: 247.

[0300] Bacterial glucoamylases contemplated include glucoamylases from the genus Clostridium, in particular C. thermoamylolyticum (EP 135,138), and C. thermohydiosulfuricum (WO 86/01831).

[0301] Contemplated fungal glucoamylases include Trametes cingulate, Pachykytospora papyracea; and Leucopaxillus giganteus all disclosed in WO2006/069289; or Peniophora rufomarginata disclosed in WO2007/124285; or a mixture thereof. Also hybrid glucoamylase are contemplated. Examples include the hybrid glucoamylases disclosed in WO2005/045018.

[0302] In one embodiment, the glucoamylase is derived from a strain of the genus Pycnoporus, in particular a strain of Pycnoporus as described in WO2011/066576 (SEQ ID NO: 2, 4 or 6 therein), including the Pycnoporus sanguineus glucoamylase, or from a strain of the genus Gloeophyllum, such as a strain of Gloeophyllum sepiarium or Gloeophyllum trabeum, in particular a strain of Gloeophyllum as described in WO2011/068803 (SEQ ID NO: 2, 4, 6, 8, 10, 12, 14 or 16 therein). In one embodiment, the glucoamylase is SEQ ID NO: 2 in WO02011/068803 (i.e. Gloeophyllum sepiarium glucoamylase). In one embodiment, the glucoamylase is the Gloeophyllum sepiarium glucoamylase of SEQ ID NO: 8. In one embodiment, the glucoamylase is the Pycnoporus sanguineus glucoamylase of SEQ ID NO: 229.

[0303] In one embodiment, the glucoamylase is a Gloeophyllum trabeum glucoamylase (disclosed as SEQ ID NO: 3 in WO2014/177546). In another embodiment, the glucoamylase is derived from a strain of the genus Nigrofomes, in particular a strain of Nigrofomes sp. disclosed in WO02012/064351 (disclosed as SEQ ID NO: 2 therein).

[0304] Also contemplated are glucoamylases with a mature polypeptide sequence which exhibit a high identity to any of the above mentioned glucoamylases, i.e., at least 60%, such as at least 70%, at least 75%, at least 80%, at least 85%, at least 90%, at least 95%, at least 96%, at least 97%, at least 98%, at least 99% or even 100% identity to any one of the mature polypeptide sequences mentioned above.

[0305] Glucoamylases may be added to the saccharification and/or fermentation in an amount of 0.0001-20 AGU/g DS, such as 0.001-10 AGU/g DS, 0.01-5 AGU/g DS, or 0.1-2 AGU/g DS.

[0306] Glucoamylases may be added to the saccharification and/or fermentation in an amount of 1-1,000 μg EP/g DS, such as 10-500 μg/gDS, or 25-250 μg/g DS.

[0307] Glucoamylases may be added to liquefaction in an amount of 0.1-100 μg EP/g DS, such as 0.5-50 μg EP/g DS, 1-25 μg EP/g DS, or 2-12 μg EP/g DS.

[0308] In one embodiment, the glucoamylase is added as a blend further comprising an alpha-amylase (e.g., any alpha-amylase described herein). In one embodiment, the alpha-amylase is a fungal alpha-amylase, especially an acid fungal alpha-amylase. The alpha-amylase is typically a side activity.

[0309] In one embodiment, the glucoamylase is a blend comprising Talaromyces emersonii glucoamylase disclosed in WO 99/28448 as SEQ ID NO: 34 and Trametes cingulata glucoamylase disclosed as SEQ ID NO: 2 in WO 06/069289.

[0310] In one embodiment, the glucoamylase is a blend comprising Talaromyces emersonii glucoamylase disclosed in WO 99/28448, Trametes cingulata glucoamylase disclosed as SEQ ID NO: 2 in WO 06/69289, and an alpha-amylase.

[0311] In one embodiment, the glucoamylase is a blend comprising Talaromyces emersonii glucoamylase disclosed in WO99/28448, Trametes cingulata glucoamylase disclosed in WO 06/69289, and Rhizomucor pusillus alpha-amylase with Aspergillus niger glucoamylase linker and SBD disclosed as V039 in Table 5 in WO2006/069290.

[0312] In one embodiment, the glucoamylase is a blend comprising Gloeophyllum sepiarium glucoamylase shown as SEQ ID NO: 2 in WO2011/068803 and an alpha-amylase, in particular Rhizomucor pusillus alpha-amylase with an Aspergillus niger glucoamylase linker and starch-binding domain (SBD), disclosed SEQ ID NO: 3 in WO2013/006756, in particular with the following substitutions: G128D+D143N.

[0313] In one embodiment, the alpha-amylase may be derived from a strain of the genus Rhizomucor, preferably a strain the Rhizomucor pusillus, such as the one shown in SEQ ID NO: 3 in WO2013/006756, or the genus Meripilus, preferably a strain of Meripilus giganteus. In one embodiment, the alpha-amylase is derived from a Rhizomucor pusillus with an Aspergillus niger glucoamylase linker and starch-binding domain (SBD), disclosed as V039 in Table 5 in WO2006/069290.

[0314] In one embodiment, the Rhizomucor pusillus alpha-amylase or the Rhizomucor pusillus alpha-amylase with an Aspergillus niger glucoamylase linker and starch-binding domain (SBD) has at least one of the following substitutions or combinations of substitutions: D165M; Y141W; Y141R; K136F; K192R; P224A; P224R; S123H+Y141W; G20S+Y141W; A76G+Y141W; G128D+Y141W; G128D+D143N; P219C+Y141W; N142D+D143N; Y141W+K192R; Y141W+D143N; Y141W+N383R; Y141W+P219C+A265C; Y141W+N142D+D143N; Y141W+K192R V410A; G128D+Y141W+D143N; Y141W+D143N+P219C; Y141W+D143N+K192R; G128D+D143N+K192R; Y141W+D143N+K192R+P219C; and G128D+Y141W+D143N+K192R; or G128D+Y141W+D143N+K192R+P219C (using SEQ ID NO: 3 in WO2013/006756 for numbering).

[0315] In one embodiment, the glucoamylase blend comprises Gloeophyllum sepiarium glucoamylase (e.g., SEQ ID NO: 2 in WO2011/068803) and Rhizomucor pusillus alpha-amylase.

[0316] In one embodiment, the glucoamylase blend comprises Gloeophyllum sepiarium glucoamylase shown as SEQ ID NO: 2 in WO2011/068803 and Rhizomucor pusillus with an Aspergillus niger glucoamylase linker and starch-binding domain (SBD), disclosed SEQ ID NO: 3 in WO2013/006756 with the following substitutions: G128D+D143N.

[0317] Commercially available compositions comprising glucoamylase include AMG 200L; AMG 300 L; SAN™ SUPER, SAN™ EXTRA L, SPIRIZYME® PLUS, SPIRIZYME® FUEL, SPIRIZYME® B4U, SPIRIZYME® ULTRA, SPIRIZYME® EXCEL, SPIRIZYME ACHIEVED, and AMG® E (from Novozymes A/S); OPTIDEX™ 300, GC480, GC417 (from DuPont-Danisco); AMIGASE™ and AMIGASE™ PLUS (from DSM); G-ZYME™ G900, G-ZYME™ and G990 ZR (from DuPont-Danisco).

[0318] In one embodiment, the glucoamylase is derived from the Debaryomyces occidentalis glucoamylase of SEQ ID NO: 102. In one embodiment, the glucoamylase is derived from the Saccharomycopsis fibuligera glucoamylase of SEQ ID NO: 103. In one embodiment, the glucoamylase is derived from the Saccharomycopsis fibuligera glucoamylase of SEQ ID NO: 104. In one embodiment, the glucoamylase is derived from the Saccharomyces cerevisiae glucoamylase of SEQ ID NO: 105. In one embodiment, the glucoamylase is derived from the Aspergillus niger glucoamylase of SEQ ID NO: 106. In one embodiment, the glucoamylase is derived from the Aspergillus oryzae glucoamylase of SEQ ID NO: 107. In one embodiment, the glucoamylase is derived from the Rhizopus oryzae glucoamylase of SEQ ID NO: 108 or SEQ ID NO: 250. In one embodiment, the glucoamylase is derived from the Clostridium thermocellum glucoamylase of SEQ ID NO: 109. In one embodiment, the glucoamylase is derived from the Clostridium thermocellum glucoamylase of SEQ ID NO: 110. In one embodiment, the glucoamylase is derived from the Arxula adeninivorans glucoamylase of SEQ ID NO: 111. In one embodiment, the glucoamylase is derived from the Hormoconis resinae glucoamylase of SEQ ID NO: 112. In one embodiment, the glucoamylase is derived from the Aureobasidium pullulans glucoamylase of SEQ ID NO: 113. In one embodiment, the glucoamylase is derived from the Rhizopus microsporus glucoamylase of SEQ ID NO: 248. In one embodiment, the glucoamylase is derived from the Rhizopus delemar glucoamylase of SEQ ID NO: 249. In one embodiment, the glucoamylase is derived from the Punctularia strigosozonata glucoamylase of SEQ ID NO: 244. In one embodiment, the glucoamylase is derived from the Fibroporia radiculosa glucoamylase of SEQ ID NO: 245. In one embodiment, the glucoamylase is derived from the Wolfiporia cocos glucoamylase of SEQ ID NO: 246.

[0319] In one embodiment, the glucoamylase is a Trichoderma reesei glucoamylase, such as the Trichoderma reesei glucoamylase of SEQ ID NO: 230.

[0320] In one embodiment, the glucoamylase has a Relative Activity heat stability at 85° C. of at least 20%, at least 30%, or at least 35% determined as described in Example 4 of WO2018/098381 (heat stability).

[0321] In one embodiment, the glucoamylase has a relative activity pH optimum at pH 5.0 of at least 90%, e.g., at least 95%, at least 97%, or 100% determined as described in Example 4 of WO2018/098381 (pH optimum).

[0322] In one embodiment, the glucoamylase has a pH stability at pH 5.0 of at least 80%, at least 85%, at least 90% determined as described in Example 4 of WO2018/098381 (pH stability).

[0323] In one embodiment, the glucoamylase used in liquefaction, such as a Penicillium oxalicum glucoamylase variant, has a thermostability determined as DSC Td at pH 4.0 as described in Example 15 of WO2018/098381 of at least 70° C., preferably at least 75° C., such as at least 80° C., such as at least 81° C., such as at least 82° C., such as at least 83° C., such as at least 84° C., such as at least 85° C., such as at least 86° C., such as at least 87%, such as at least 88° C., such as at least 89° C., such as at least 90° C. In one embodiment, the glucoamylase, such as a Penicillium oxalicum glucoamylase variant, has a thermostability determined as DSC Td at pH 4.0 as described in Example 15 of WO2018/098381 in the range between 70° C. and 95° C., such as between 80° C. and 90° C.

[0324] In one embodiment, the glucoamylase, such as a Penicillium oxalicum glucoamylase variant, used in liquefaction has a thermostability determined as DSC Td at pH 4.8 as described in Example 15 of WO2018/098381 of at least 70° C., preferably at least 75° C., such as at least 80° C., such as at least 81° C., such as at least 82° C., such as at least 83° C., such as at least 84° C., such as at least 85° C., such as at least 86° C., such as at least 87%, such as at least 88° C., such as at least 89° C., such as at least 90° C., such as at least 91° C. In one embodiment, the glucoamylase, such as a Penicillium oxalicum glucoamylase variant, has a thermostability determined as DSC Td at pH 4.8 as described in Example 15 of WO2018/098381 in the range between 70° C. and 95° C., such as between 80° C. and 90° C.

[0325] In one embodiment, the glucoamylase, such as a Penicillium oxalicum glucoamylase variant, used in liquefaction has a residual activity determined as described in Example 16 of WO2018/098381, of at least 100% such as at least 105%, such as at least 110%, such as at least 115%, such as at least 120%, such as at least 125%. In one embodiment, the glucoamylase, such as a Penicillium oxalicum glucoamylase variant, has a thermostability determined as residual activity as described in Example 16 of WO2018/098381, in the range between 100% and 130%.

[0326] In one embodiment, the glucoamylase, e.g., of fungal origin such as a filamentous fungi, from a strain of the genus Penicillium, e.g., a strain of Penicillium oxalicum, in particular the Penicillium oxalicum glucoamylase disclosed as SEQ ID NO: 2 in WO02011/127802 (which is hereby incorporated by reference).

[0327] In one embodiment, the glucoamylase has a mature polypeptide sequence of at least 80%, e.g., at least 85%, at least 90%, at least 91%, at least 92%, at least 93%, at least 94%, at least 95%, at least 96%, at least 97%, at least 98%, at least 99% or 100% identity to the mature polypeptide shown in SEQ ID NO: 2 in WO2011/127802.

[0328] In one embodiment, the glucoamylase is a variant of the Penicillium oxalicum glucoamylase disclosed as SEQ ID NO: 2 in WO2011/127802, having a K79V substitution.

[0329] The K79V glucoamylase variant has reduced sensitivity to protease degradation relative to the parent as disclosed in WO02013/036526 (which is hereby incorporated by reference).

[0330] In one embodiment, the glucoamylase is derived from Penicillium oxalicum.

[0331] In one embodiment, the glucoamylase is a variant of the Penicillium oxalicum glucoamylase disclosed as SEQ ID NO: 2 in WO2011/127802. In one embodiment, the Penicillium oxalicum glucoamylase is the one disclosed as SEQ ID NO: 2 in WO02011/127802 having Val (V) in position 79.

[0332] Contemplated Penicillium oxalicum glucoamylase variants are disclosed in WO02013/053801 which is hereby incorporated by reference.

[0333] In one embodiment, these variants have reduced sensitivity to protease degradation.

[0334] In one embodiment, these variants have improved thermostability compared to the parent.

[0335] In one embodiment, the glucoamylase has a K79V substitution (using SEQ ID NO: 2 of WO02011/127802 for numbering), corresponding to the PE001 variant, and further comprises one of the following alterations or combinations of alterations T65A; Q327F; E501V; Y504T; Y504*; T65A+Q327F; T65A+E501V; T65A+Y504T; T65A+Y504*; Q327F+E501V; Q327F+Y504T; Q327F+Y504*; E501V+Y504T; E501V+Y504*; T65A+Q327F+E501V; T65A+Q327F+Y504T; T65A+E501V+Y504T; Q327F+E501V+Y504T; T65A+Q327F+Y504*; T65A+E501V+Y504*; Q327F+E501V+Y504*; T65A+Q327F+E501V+Y504T; T65A+Q327F+E501V+Y504*; E501V+Y504T; T65A+K161S; T65A+Q405T; T65A+Q327W; T65A+Q327F; T65A+Q327Y; P11F+T65A+Q327F; R1K+D3W+K5Q+G7V+N8S+T10K+P11S+T65A+Q327F; P2N+P4S+P11F+T65A+Q327F; P11F+D26C+K33C+T65A+Q327F; P2N+P4S+P11F+T65A+Q327W+E501V+Y504T; R1E+D3N+P4G+G6R+G7A+N8A+T10D+P11D+T65A+Q327F; P11F+T65A+Q327W; P2N+P4S+P11F+T65A+Q327F+E501V+Y504T; P11F+T65A+Q327W+E501V+Y504T; T65A+Q327F+E501V+Y504T; T65A+S105P+Q327W; T65A+S105P+Q327F; T65A+Q327W+S364P; T65A+Q327F+S364P; T65A+S103N+Q327F; P2N+P4S+P11F+K34Y+T65A+Q327F; P2N+P4S+P11F+T65A+Q327F+D445N+V447S; P2N+P4S+P11F+T65A+1172V+Q327F; P2N+P4S+P11F+T65A+Q327F+N502*; P2N+P4S+P11F+T65A+Q327F+N502T+P563S+K571E; P2N+P4S+P11F+R31S+K33V+T65A+Q327F+N564D+K571S; P2N+P4S+P11F+T65A+Q327F+S377T; P2N+P4S+P11F+T65A+V325T+Q327W; P2N+P4S+P11F+T65A+Q327F+D445N+V447S+E501V+Y504T; P2N+P4S+P11F+T65A+1172V+Q327F+E501V+Y504T; P2N+P4S+P11F+T65A+Q327F+S377T+E501V+Y504T; P2N+P4S+P11F+D26N+K34Y+T65A+Q327F; P2N+P4S+P11F+T65A+Q327F+1375A+E501V+Y504T; P2N+P4S+P11F+T65A+K218A+K221D+Q327F+E501V+Y504T; P2N+P4S+P11F+T65A+S103N+Q327F+E501V+Y504T; P2N+P4S+T10D+T65A+Q327F+E501V+Y504T; P2N+P4S+F12Y+T65A+Q327F+E501V+Y504T; K5A+P11F+T65A+Q327F+E501V+Y504T; P2N+P4S+T10E+E18N+T65A+Q327F+E501V+Y504T; P2N+T10E+E18N+T65A+Q327F+E501V+Y504T; P2N+P4S+P11F+T65A+Q327F+E501V+Y504T+T568N; P2N+P4S+P11F+T65A+Q327F+E501V+Y504T+K524T+G526A; P2N+P4S+P11F+K34Y+T65A+Q327F+D445N+V447S+E501V+Y504T; P2N+P4S+P11F+R31S+K33V+T65A+Q327F+D445N+V447S+E501V+Y504T; P2N+P4S+P11F+D26N+K34Y+T65A+Q327F+E501V+Y504T; P2N+P4S+P11F+T65A+F80*+Q327F+E501V+Y504T; P2N+P4S+P11F+T65A+K112S+Q327F+E501V+Y504T; P2N+P4S+P11F+T65A+Q327F+E501V+Y504T+T516P+K524T+G526A; P2N+P4S+P11F+T65A+Q327F+E501V+N502T+Y504*; P2N+P4S+P11F+T65A+Q327F+E501V+Y504T; P2N+P4S+P11F+T65A+S103N+Q327F+E501V+Y504T; K5A+P11F+T65A+Q327F+E501V+Y504T; P2N+P4S+P11F+T65A+Q327F+E501V+Y504T+T516P+K524T+G526A; P2N+P4S+P11F+T65A+V79A+Q327F+E501V+Y504T; P2N+P4S+P11F+T65A+V79G+Q327F+E501V+Y504T; P2N+P4S+P11F+T65A+V791+Q327F+E501V+Y504T; P2N+P4S+P11F+T65A+V79L+Q327F+E501V+Y504T; P2N+P4S+P11F+T65A+V79S+Q327F+E501V+Y504T; P2N+P4S+P11F+T65A+L72V+Q327F+E501V+Y504T; S255N+Q327F+E501V+Y504T; P2N+P4S+P11F+T65A+E74N+V79K+Q327F+E501V+Y504T; P2N+P4S+P11F+T65A+G220N+Q327F+E501V+Y504T; P2N+P4S+P11F+T65A+Y245N+Q327F+E501V+Y504T; P2N+P4S+P11F+T65A+Q253N+Q327F+E501V+Y504T; P2N+P4S+P11F+T65A+D279N+Q327F+E501V+Y504T; P2N+P4S+P11F+T65A+Q327F+S359N+E501V+Y504T; P2N+P4S+P11F+T65A+Q327F+D370N+E501V+Y504T; P2N+P4S+P11F+T65A+Q327F+V460S+E501V+Y504T; P2N+P4S+P11F+T65A+Q327F+V460T+P468T+E501V+Y504T; P2N+P4S+P11F+T65A+Q327F+T463N+E501V+Y504T; P2N+P4S+P11F+T65A+Q327F+S465N+E501V+Y504T; and P2N+P4S+P11F+T65A+Q327F+T477N+E501V+Y504T.

[0336] In one embodiment, the Penicillium oxalicum glucoamylase variant has a K79V substitution (using SEQ ID NO: 2 of WO2011/127802 for numbering), corresponding to the PE001 variant, and further comprises one of the following substitutions or combinations of substitutions:

[0337] P11F+T65A+Q327F;

[0338] P2N+P4S+P11F+T65A+Q327F;

[0339] P11F+D26C+K33C+T65A+Q327F;

[0340] P2N+P4S+P11F+T65A+Q327W+E501V+Y504T;

[0341] P2N+P4S+P11F+T65A+Q327F+E501V+Y504T; and

[0342] P11F+T65A+Q327W+E501V+Y504T.

[0343] Additional glucoamylases contemplated for use with the present invention can be found in WO02011/153516 (the content of which is incorporated herein).

[0344] Additional polynucleotides encoding suitable glucoamylases may be obtained from microorganisms of any genus, including those readily available within the UniProtKB database.

[0345] The glucoamylase coding sequences can also be used to design nucleic acid probes to identify and clone DNA encoding glucoamylases from strains of different genera or species, as described supra.

[0346] The polynucleotides encoding glucoamylases may also be identified and obtained from other sources including microorganisms isolated from nature (e.g., soil, composts, water, etc.) or DNA samples obtained directly from natural materials (e.g., soil, composts, water, etc) as described supra.

[0347] Techniques used to isolate or clone polynucleotides encoding glucoamylases are described supra.

[0348] In one embodiment, the glucoamylase has a mature polypeptide sequence that comprises or consists of the amino acid sequence of any one of the glucoamylases described or referenced herein (e.g., any one of SEQ ID NOs: 8, 102-113, 229, 230 and 244-250). In another embodiment, the glucoamylase has a mature polypeptide sequence that is a fragment of the any one of the glucoamylases described or referenced herein (e.g., any one of SEQ ID NOs: 8, 102-113, 229, 230 and 244-250). In one embodiment, the number of amino acid residues in the fragment is at least 75%, e.g., at least 80%, 85%, 90%, or 95% of the number of amino acid residues in referenced full length glucoamylase (e.g. any one of SEQ ID NOs: 8, 102-113, 229, 230 and 244-250). In other embodiments, the glucoamylase may comprise the catalytic domain of any glucoamylase described or referenced herein (e.g., the catalytic domain of any one of SEQ ID NOs: 8, 102-113, 229, 230 and 244-250).

[0349] The glucoamylase may be a variant of any one of the glucoamylases described supra (e.g., any one of SEQ ID NOs: 8,102-113, 229, 230 and 244-250). In one embodiment, the glucoamylase has a mature polypeptide sequence of at least 60%, e.g., at least 65%, 70%, 75%, 80%, 85%, 90%, 95%, 97%, 98%, 99%, or 100% sequence identity to any one of the glucoamylases described supra (e.g., any one of SEQ ID NOs: 8, 102-113, 229, 230 and 244-250).

[0350] Examples of suitable amino acid changes, such as conservative substitutions that do not significantly affect the folding and/or activity of the glucoamylase, are described herein.

[0351] In one embodiment, the glucoamylase has a mature polypeptide sequence that differs by no more than ten amino acids, e.g., by no more than five amino acids, by no more than four amino acids, by no more than three amino acids, by no more than two amino acids, or by one amino acid from the amino acid sequence of any one of the glucoamylases described supra (e.g., any one of SEQ ID NOs: 8, 102-113, 229, 230 and 244-250). In one embodiment, the glucoamylase has an amino acid substitution, deletion, and/or insertion of one or more (e.g., two, several) of amino acid sequence of any one of the glucoamylases described supra (e.g., any one of SEQ ID NOs: 8,102-113,229, 230 and 244-250). In some embodiments, the total number of amino acid substitutions, deletions and/or insertions is not more than 10, e.g., not more than 9, 8, 7, 6, 5, 4, 3, 2, or 1.

[0352] In some embodiments, the glucoamylase has at least 20%, e.g., at least 40%, at least 50%, at least 60%, at least 70%, at least 80%, at least 90%, at least 95%, at least 96%, at least 97%, at least 98%, at least 99%, or 100% of the glucoamylase activity of any glucoamylase described or referenced herein (e.g., any one of SEQ ID NOs: 8, 102-113, 229, 230 and 244-250) under the same conditions.

[0353] In one embodiment, the glucoamylase coding sequence hybridizes under at least low stringency conditions, e.g., medium stringency conditions, medium-high stringency conditions, high stringency conditions, or very high stringency conditions with the full-length complementary strand of the coding sequence from any glucoamylase described or referenced herein (e.g., any one of SEQ ID NOs: 8, 102-113, 229, 230 and 244-250). In one embodiment, the glucoamylase coding sequence has at least 65%, e.g., at least 70%, at least 75%, at least 80%, at least 85%, at least 85%, at least 90%, at least 91%, at least 92%, at least 93%, at least 94%, at least 95%, at least 96%, at least 97%, at least 98%, at least 99%, or 100% sequence identity with the coding sequence from any glucoamylase described or referenced herein (e.g., any one of SEQ ID NOs: 8, 102-113, 229, 230 and 244-250).

[0354] In one embodiment, the glucoamylase comprises the coding sequence of any glucoamylase described or referenced herein (any one of SEQ ID NOs: 8, 102-113, 229, 230 and 244-250). In one embodiment, the glucoamylase comprises a coding sequence that is a subsequence of the coding sequence from any glucoamylase described or referenced herein, wherein the subsequence encodes a polypeptide having glucoamylase activity. In one embodiment, the number of nucleotides residues in the subsequence is at least 75%, e.g., at least 80%, 85%, 90%, or 95% of the number of the referenced coding sequence.

[0355] The referenced glucoamylase coding sequence of any related aspect or embodiment described herein can be the native coding sequence or a degenerate sequence, such as a codon-optimized coding sequence designed for use in a particular host cell (e.g., optimized for expression in Saccharomyces cerevisiae).

[0356] The glucoamylase can also include fused polypeptides or cleavable fusion polypeptides, as described supra. In some embodiments, the glucoamylase is a fusion protein comprising a signal peptide linked to the N-terminus of a mature polypeptide, such as any signal sequences described in U.S. Provisional Application No. 62/883,519 filed Aug. 6, 2019 and entitled “Fusion Proteins For Improved Enzyme Expression” (the content of which is hereby incorporated by reference).

### Alpha-Amylases

[0357] The host cells and fermenting organisms may express a heterologous alpha-amylase. The alpha-amylase may be any alpha-amylase that is suitable for the host cells and/or the methods described herein, such as a naturally occurring alpha-amylase (e.g., a native alpha-amylase from another species or an endogenous alpha-amylase expressed from a modified expression vector) or a variant thereof that retains alpha-amylase activity. Any alpha-amylase contemplated for expression by a host cell or fermenting organism described below is also contemplated for embodiments of the invention involving exogenous addition of an alpha-amylase.

[0358] In some embodiments, the host cell or fermenting organism comprises a heterologous polynucleotide encoding an alpha-amylase, for example, as described in WO02017/087330 or WO02020/023411, the content of which is hereby incorporated by reference. Any alpha-amylase described or referenced herein is contemplated for expression in the host cell or fermenting organism.

[0359] In some embodiments, the host cell or fermenting organism comprising a heterologous polynucleotide encoding an alpha-amylase has an increased level of alpha-amylase activity compared to the host cells without the heterologous polynucleotide encoding the alpha-amylase, when cultivated under the same conditions. In some embodiments, the host cell or fermenting organism has an increased level of alpha-amylase activity of at least 5%, e.g., at least 10%, at least 15%, at least 20%, at least 25%, at least 50%, at least 100%, at least 150%, at least 200%, at least 300%, or at 500% compared to the host cell or fermenting organism without the heterologous polynucleotide encoding the alpha-amylase, when cultivated under the same conditions (e.g., as described in Example 2).

[0360] Exemplary alpha-amylases that can be used with the host cells and/or the methods described herein include bacterial, yeast, or filamentous fungal alpha-amylases, e.g., derived from any of the microorganisms described or referenced herein.

[0361] The term “bacterial alpha-amylase” means any bacterial alpha-amylase classified under EC 3.2.1.1. A bacterial alpha-amylase used herein may, e.g., be derived from a strain of the genus Bacillus, which is sometimes also referred to as the genus Geobacillus. In one embodiment, the Bacillus alpha-amylase is derived from a strain of Bacillus amyloliquefaciens, Bacillus licheniformis, Bacillus stearothermophilus, or Bacillus subtilis, but may also be derived from other Bacillus sp.

[0362] Specific examples of bacterial alpha-amylases include the Bacillus stearothermophilus alpha-amylase (BSG) of SEQ ID NO: 3 in WO 99/19467, the Bacillus amyloliquefaciens alpha-amylase (BAN) of SEQ ID NO: 5 in WO 99/19467, and the Bacillus licheniformis alpha-amylase (BLA) of SEQ ID NO: 4 in WO 99/19467 (all sequences are hereby incorporated by reference). In one embodiment, the alpha-amylase may be an enzyme having a mature polypeptide sequence with a degree of identity of at least 60%, e.g., at least 70%, at least 80%, at least 90%, at least 95%, at least 96%, at least 97%, at least 98% or at least 99% to any of the sequences shown in SEQ ID NOs: 3, 4 or 5, in WO 99/19467.

[0363] In one embodiment, the alpha-amylase is derived from Bacillus stearothermophilus. The Bacillus stearothermophilus alpha-amylase may be a mature wild-type or a mature variant thereof. The mature Bacillus stearothermophilus alpha-amylases may naturally be truncated during recombinant production. For instance, the Bacillus stearothermophilus alpha-amylase may be a truncated at the C-terminal, so that it is from 480-495 amino acids long, such as about 491 amino acids long, e.g., so that it lacks a functional starch binding domain (compared to SEQ ID NO: 3 in WO 99/19467).

[0364] The Bacillus alpha-amylase may also be a variant and/or hybrid. Examples of such a variant can be found in any of WO 96/23873, WO 96/23874, WO 97/41213, WO 99/19467, WO 00/60059, and WO 02/10355 (each hereby incorporated by reference). Specific alpha-amylase variants are disclosed in U.S. Pat. Nos. 6,093,562, 6,187,576, 6,297,038, and 7,713,723 (hereby incorporated by reference) and include Bacillus stearothermophilus alpha-amylase (often referred to as BSG alpha-amylase) variants having a deletion of one or two amino acids at positions R179, G180, I181 and/or G182, preferably a double deletion disclosed in WO 96/23873—see, e.g., page 20, lines 1-10 (hereby incorporated by reference), such as corresponding to deletion of positions I181 and G182 compared to the amino acid sequence of Bacillus stearothermophilus alpha-amylase set forth in SEQ ID NO: 3 disclosed in WO 99/19467 or the deletion of amino acids R179 and G180 using SEQ ID NO: 3 in WO 99/19467 for numbering (which reference is hereby incorporated by reference). In some embodiments, the Bacillus alpha-amylases, such as Bacillus stearothermophilus alpha-amylases, have a double deletion corresponding to a deletion of positions 181 and 182 and further optionally comprise a N193F substitution (also denoted I181*+G182*+N193F) compared to the wild-type BSG alpha-amylase amino acid sequence set forth in SEQ ID NO: 3 disclosed in WO 99/19467. The bacterial alpha-amylase may also have a substitution in a position corresponding to S239 in the Bacillus licheniformis alpha-amylase shown in SEQ ID NO: 4 in WO 99/19467, or a S242 and/or E188P variant of the Bacillus stearothermophilus alpha-amylase of SEQ ID NO: 3 in WO 99/19467.

[0365] In one embodiment, the variant is a S242A, E or Q variant, e.g., a S242Q variant, of the Bacillus stearothermophilus alpha-amylase.

[0366] In one embodiment, the variant is a position E188 variant, e.g., E188P variant of the Bacillus stearothermophilus alpha-amylase.

[0367] The bacterial alpha-amylase may, in one embodiment, be a truncated Bacillus alpha-amylase. In one embodiment, the truncation is so that, e.g., the Bacillus stearothermophilus alpha-amylase shown in SEQ ID NO: 3 in WO 99/19467, is about 491 amino acids long, such as from 480 to 495 amino acids long, or so it lacks a functional starch bind domain.

[0368] The bacterial alpha-amylase may also be a hybrid bacterial alpha-amylase, e.g., an alpha-amylase comprising 445 C-terminal amino acid residues of the Bacillus licheniformis alpha-amylase (shown in SEQ ID NO: 4 of WO 99/19467) and the 37 N-terminal amino acid residues of the alpha-amylase derived from Bacillus amyloliquefaciens (shown in SEQ ID NO: 5 of WO 99/19467). In one embodiment, this hybrid has one or more, especially all, of the following substitutions: G48A+T49I+G107A+H156Y+A181T+N190F+I201F+A209V+Q264S (using the Bacillus licheniformis numbering in SEQ ID NO: 4 of WO 99/19467). In some embodiments, the variants have one or more of the following mutations (or corresponding mutations in other Bacillus alpha-amylases): H154Y, A181T, N190F, A209V and Q264S and/or the deletion of two residues between positions 176 and 179, e.g., deletion of E178 and G179 (using SEQ ID NO: 5 of WO 99/19467 for position numbering).

[0369] In one embodiment, the bacterial alpha-amylase is the mature part of the chimeric alpha-amylase disclosed in Richardson et al. (2002), The Journal of Biological Chemistry, Vol. 277, No 29, Issue 19 July, pp. 267501-26507, referred to as BD5088 or a variant thereof. This alpha-amylase is the same as the one shown in SEQ ID NO: 2 in WO2007/134207. The mature enzyme sequence starts after the initial “Met” amino acid in position 1.

[0370] The alpha-amylase may be a thermostable alpha-amylase, such as a thermostable bacterial alpha-amylase, e.g., from Bacillus stearothermophilus. In one embodiment, the alpha-amylase used in a process described herein has a T½ (min) at pH 4.5, 85° C., 0.12 mM CaCl₂ of at least 10 determined as described in Example 1 of WO2018/098381.

[0371] In one embodiment, the thermostable alpha-amylase has a T½ (min) at pH 4.5, 85° C., 0.12 mM CaCl₂, of at least 15. In one embodiment, the thermostable alpha-amylase has a T½ (min) at pH 4.5, 85° C., 0.12 mM CaCl₂, of as at least 20. In one embodiment, the thermostable alpha-amylase has a T½ (min) at pH 4.5, 85° C., 0.12 mM CaCl₂, of as at least 25. In one embodiment, the thermostable alpha-amylase has a T½ (min) at pH 4.5, 85° C., 0.12 mM CaCl₂, of as at least 30. In one embodiment, the thermostable alpha-amylase has a T½ (min) at pH 4.5, 85° C., 0.12 mM CaCl₂, of as at least 40.

[0372] In one embodiment, the thermostable alpha-amylase has a T½ (min) at pH 4.5, 85° C., 0.12 mM CaCl₂, of at least 50. In one embodiment, the thermostable alpha-amylase has a T½ (min) at pH 4.5, 85° C., 0.12 mM CaCl₂, of at least 60. In one embodiment, the thermostable alpha-amylase has a T½ (min) at pH 4.5, 85° C., 0.12 mM CaCl₂, between 10-70. In one embodiment, the thermostable alpha-amylase has a T½ (min) at pH 4.5, 85° C., 0.12 mM CaCl₂, between 15-70. In one embodiment, the thermostable alpha-amylase has a T½ (min) at pH 4.5, 85° C., 0.12 mM CaCl₂, between 20-70. In one embodiment, the thermostable alpha-amylase has a T½ (min) at pH 4.5, 85° C., 0.12 mM CaCl₂, between 25-70. In one embodiment, the thermostable alpha-amylase has a T½ (min) at pH 4.5, 85° C., 0.12 mM CaCl₂, between 30-70. In one embodiment, the thermostable alpha-amylase has a T½ (min) at pH 4.5, 85° C., 0.12 mM CaCl₂, between 40-70. In one embodiment, the thermostable alpha-amylase has a T½ (min) at pH 4.5, 85° C., 0.12 mM CaCl₂, between 50-70. In one embodiment, the thermostable alpha-amylase has a T½ (min) at pH 4.5, 85° C., 0.12 mM CaCl₂, between 60-70.

[0373] In one embodiment, the alpha-amylase is a bacterial alpha-amylase, e.g., derived from the genus Bacillus, such as a strain of Bacillus stearothermophilus, e.g., the Bacillus stearothermophilus as disclosed in WO 99/019467 as SEQ ID NO: 3 with one or two amino acids deleted at positions R179, G180, I181 and/or G182, in particular with R179 and G180 deleted, or with I181 and G182 deleted, with mutations in below list of mutations.

[0374] In some embodiment, the Bacillus stearothermophilus alpha-amylases have double deletion I181+G182, and optional substitution N193F, further comprising one of the following substitutions or combinations of substitutions:

[0375] V59A+Q89R+G112D+E129V+K177L+R179E+K220P+N224L+Q254S;

[0376] V59A+Q89R+E129V+K177L+R179E+H208Y+K220P+N224L+Q254S;

[0377] V59A+Q89R+E129V+K177L+R179E+K220P+N224L+Q254S+D269E+D281N;

[0378] V59A+Q89R+E129V+K177L+R179E+K220P+N224L+Q254S+I270L;

[0379] V59A+Q89R+E129V+K177L+R179E+K220P+N224L+Q254S+H274K;

[0380] V59A+Q89R+E129V+K177L+R179E+K220P+N224L+Q254S+Y276F;

[0381] V59A+E129V+R157Y+K177L+R179E+K220P+N224L+S242Q+Q254S;

[0382] V59A+E129V+K177L+R179E+H208Y+K220P+N224L+S242Q+Q254S;

[0383] V59A+E129V+K177L+R179E+K220P+N224L+S242Q+Q254S;

[0384] V59A+E129V+K177L+R179E+K220P+N224L+S242Q+Q254S+H274K;

[0385] V59A+E129V+K177L+R179E+K220P+N224L+S242Q+Q254S+Y276F;

[0386] V59A+E129V+K177L+R179E+K220P+N224L+S242Q+Q254S+D281N;

[0387] V59A+E129V+K177L+R179E+K220P+N224L+S242Q+Q254S+M284T;

[0388] V59A+E129V+K177L+R179E+K220P+N224L+S242Q+Q254S+G416V;

[0389] V59A+E129V+K177L+R179E+K220P+N224L+Q254S;

[0390] V59A+E129V+K177L+R179E+K220P+N224L+Q254S+M284T;

[0391] A91L+M961+E129V+K177L+R179E+K220P+N224L+S242Q+Q254S;

[0392] E129V+K177L+R179E;

[0393] E129V+K177L+R179E+K220P+N224L+S242Q+Q254S;

[0394] E129V+K177L+R179E+K220P+N224L+S242Q+Q254S+Y276F+L427M;

[0395] E129V+K177L+R179E+K220P+N224L+S242Q+Q254S+M284T;

[0396] E129V+K177L+R179E+K220P+N224L+S242Q+Q254S+N376*+I377*;

[0397] E129V+K177L+R179E+K220P+N224L+Q254S;

[0398] E129V+K177L+R179E+K220P+N224L+Q254S+M284T;

[0399] E129V+K177L+R179E+S242Q;

[0400] E129V+K177L+R179V+K220P+N224L+S242Q+Q254S;

[0401] K220P+N224L+S242Q+Q254S;

[0402] M284V;

[0403] V59A+Q89R+E129V+K177L+R179E+Q254S+M284V; and

[0404] V59A+E129V+K177L+R179E+Q254S+M284V;

[0405] In one embodiment, the alpha-amylase is selected from the group of Bacillus stearothermophilus alpha-amylase variants with double deletion I181*+G182*, and optionally substitution N193F, and further one of the following substitutions or combinations of substitutions:

[0406] E129V+K177L+R179E;

[0407] V59A+Q89R+E129V+K177L+R179E+H208Y+K220P+N224L+Q254S;

[0408] V59A+Q89R+E129V+K177L+R179E+Q254S+M284V;

[0409] V59A+E129V+K177L+R179E+Q254S+M284V; and

[0410] E129V+K177L+R179E+K220P+N224L+S242Q+Q254S (using SEQ ID NO: 1 herein for numbering).

[0411] It should be understood that when referring to Bacillus stearothermophilus alpha-amylase and variants thereof they are normally produced in truncated form. In particular, the truncation may be so that the Bacillus stearothermophilus alpha-amylase shown in SEQ ID NO: 3 in WO 99/19467, or variants thereof, are truncated in the C-terminal and are typically from 480-495 amino acids long, such as about 491 amino acids long, e.g., so that it lacks a functional starch binding domain.

[0412] In one embodiment, the alpha-amylase variant may be an enzyme having a mature polypeptide sequence with a degree of identity of at least 60%, e.g., at least 70%, at least 80%, at least 90%, at least 95%, at least 91%, at least 92%, at least 93%, at least 94%, at least 95%, at least 96%, at least 97%, at least 98% or at least 99%, but less than 100% to the sequence shown in SEQ ID NO: 3 in WO 99/19467.

[0413] In one embodiment, the bacterial alpha-amylase, e.g., Bacillus alpha-amylase, such as especially Bacillus stearothermophilus alpha-amylase, or variant thereof, is dosed to liquefaction in a concentration between 0.01-10 KNU-A/g DS, e.g., between 0.02 and 5 KNU-A/g DS, such as 0.03 and 3 KNU-A, preferably 0.04 and 2 KNU-A/g DS, such as especially 0.01 and 2 KNU-A/g DS. In one embodiment, the bacterial alpha-amylase, e.g., Bacillus alpha-amylase, such as especially Bacillus stearothermophilus alpha-amylases, or variant thereof, is dosed to liquefaction in a concentration of between 0.0001-1 mg EP (Enzyme Protein)/g DS, e.g., 0.0005-0.5 mg EP/g DS, such as 0.001-0.1 mg EP/g DS.

[0414] In one embodiment, the bacterial alpha-amylase is derived from the Bacillus subtilis alpha-amylase of SEQ ID NO: 76, the Bacillus subtilis alpha-amylase of SEQ ID NO: 82, the Bacillus subtilis alpha-amylase of SEQ ID NO: 83, the Bacillus subtilis alpha-amylase of SEQ ID NO: 84, or the Bacillus licheniformis alpha-amylase of SEQ ID NO: 85, the Clostridium phytofermentans alpha-amylase of SEQ ID NO: 89, the Clostridium phytofermentans alpha-amylase of SEQ ID NO: 90, the Clostridium phytofermentans alpha-amylase of SEQ ID NO: 91, the Clostridium phytofermentans alpha-amylase of SEQ ID NO: 92, the Clostridium phytofermentans alpha-amylase of SEQ ID NO: 93, the Clostridium phytofermentans alpha-amylase of SEQ ID NO: 94, the Clostridium thermocellum alpha-amylase of SEQ ID NO: 95, the Thermobifida fusca alpha-amylase of SEQ ID NO: 96, the Thermobifida fusca alpha-amylase of SEQ ID NO: 97, the Anaerocellum thermophilum of SEQ ID NO: 98, the Anaerocellum thermophilum of SEQ ID NO: 99, the Anaerocellum thermophilum of SEQ ID NO: 100, the Streptomyces avermitilis of SEQ ID NO: 101, or the Streptomyces avermitilis of SEQ ID NO: 88.

[0415] In one embodiment, the alpha-amylase is derived from Bacillus amyloliquefaciens, such as the Bacillus amyloliquefaciens alpha-amylase of SEQ ID NO: 231 (e.g., as described in WO2018/002360, or variants thereof as described in WO2017/037614).

[0416] In one embodiment, the alpha-amylase is derived from a yeast alpha-amylase, such as the Saccharomycopsis fibuligera alpha-amylase of SEQ ID NO: 77, the Debaryomyces occidentalis alpha-amylase of SEQ ID NO: 78, the Debaryomyces occidentalis alpha-amylase of SEQ ID NO: 79, the Lipomyces kononenkoae alpha-amylase of SEQ ID NO: 80, the Lipomyces kononenkoae alpha-amylase of SEQ ID NO: 81.

[0417] In one embodiment, the alpha-amylase is derived from a filamentous fungal alpha-amylase, such as the Aspergillus niger alpha-amylase of SEQ ID NO: 86, or the Aspergillus niger alpha-amylase of SEQ ID NO: 87.

[0418] Additional alpha-amylases that may be expressed with the host cells and fermenting organisms and used with the methods described herein are described in the examples, and include, but are not limited to alpha-amylases shown in Table 4 (or derivatives thereof).

TABLE 4

| Donor Organism | SEQ ID NO: |
|---|---|
| (catalytic domain) | (mature polypeptide) |
| Rhizomucor pusillus | 121 |
| Bacillus licheniformis | 122 |
| Aspergillus niger | 123 |
| Aspergillus tamarii | 124 |
| Acidomyces richmondensis | 125 |
| Aspergillus bombycis | 126 |
| Alternaria sp | 127 |
| Rhizopus microsporus | 128 |
| Syncephalastrum racemosum | 129 |
| Rhizomucor pusillus | 130 |
| Dichotomocladium hesseltinei | 131 |
| Lichtheimia ramosa | 132 |
| Penicillium aethiopicum | 133 |
| Subulispora sp | 134 |
| Trichoderma paraviridescens | 135 |
| Byssoascus striatosporus | 136 |
| Aspergillus brasiliensis | 137 |
| Penicillium subspinulosum | 138 |
| Penicillium antarcticum | 139 |
| Penicillium coprophilum | 140 |
| Penicillium olsonii | 141 |
| Penicillium vasconiae | 142 |
| Penicillium sp | 143 |
| Heterocephalum aurantiacum | 144 |
| Neosartorya massa | 145 |
| Penicillium janthinellum | 146 |
| Aspergillus brasiliensis | 147 |
| Aspergillus westerdijkiae | 148 |
| Hamigera avellanea | 149 |
| Hamigera avellanea | 150 |
| Meripilus giganteus | 151 |
| Cerrena unicolor | 152 |
| Physalacria cryptomeriae | 153 |
| Lenzites betulinus | 154 |
| Trametes ljubarskyi | 155 |
| Bacillus subtilis | 156 |
| Bacillus subtilis subsp. subtilis | 157 |
| Schwanniomyces occidentalis | 158 |
| Rhizomucor pusillus | 159 |
| Aspergillus niger | 160 |
| Bacillus stearothermophilus | 161 |
| Bacillus halmapalus | 162 |
| Aspergillus oryzae | 163 |
| Bacillus amyloliquefaciens | 164 |
| Rhizomucor pusillus | 165 |
| Kionochaeta ivoriensis | 166 |
| Aspergillus niger | 167 |
| Aspergillus oryzae | 168 |
| Penicillium canescens | 169 |
| Acidomyces acidothermus | 170 |
| Kinochaeta ivoriensis | 171 |
| Aspergillus terreus | 172 |
| Thamnidium elegans | 173 |
| Meripilus giganteus | 174 |
| Bacillus amyloliquefaciens | 231 |
| Thermococcus gammatolerans | 251 |
| Thermococcus thioreducens | 252 |
| Thermococcus eurythermalis | 253 |
| Thermococcus hydrothermalis | 254 |
| Pyrococcus furiosus | 255 |
| Bacillus amyloliquefaciens | 256 |

[0419] Additional alpha-amylases contemplated for use with the present invention can be found in WO2011/153516, WO2017/087330 and WO2020/023411 (the content of which is incorporated herein).

[0420] Additional polynucleotides encoding suitable alpha-amylases may be obtained from microorganisms of any genus, including those readily available within the UniProtKB database.

[0421] The alpha-amylase coding sequences can also be used to design nucleic acid probes to identify and clone DNA encoding trehalases from strains of different genera or species, as described supra.

[0422] The polynucleotides encoding alpha-amylases may also be identified and obtained from other sources including microorganisms isolated from nature (e.g., soil, composts, water, etc.) or DNA samples obtained directly from natural materials (e.g., soil, composts, water, etc.) as described supra.

[0423] Techniques used to isolate or clone polynucleotides encoding alpha-amylases are described supra.

[0424] In one embodiment, the alpha-amylase has a mature polypeptide sequence that comprises or consists of the amino acid sequence of any one of the alpha-amylases described or referenced herein (e.g., any one of SEQ ID NOs: 76-101, 121-174, 231 and 251-256). In another embodiment, the alpha-amylase has a mature polypeptide sequence that is a fragment of the any one of the alpha-amylases described or referenced herein (e.g., any one of SEQ ID NOs: 76-101,121-174, 231 and 251-256). In one embodiment, the number of amino acid residues in the fragment is at least 75%, e.g., at least 80%, 85%, 90%, or 95% of the number of amino acid residues in referenced full length alpha-amylase (e.g. any one of SEQ ID NOs: 76-101, 121-174, 231 and 251-256). In other embodiments, the alpha-amylase may comprise the catalytic domain of any alpha-amylase described or referenced herein (e.g., the catalytic domain of any one of SEQ ID NOs: 76-101, 121-174, 231 and 251-256).

[0425] The alpha-amylase may be a variant of any one of the alpha-amylases described supra (e.g., any one of SEQ ID NOs: 76-101, 121-174, 231 and 251-256). In one embodiment, the alpha-amylase has a mature polypeptide sequence of at least 60%, e.g., at least 65%, 70%, 75%, 80%, 85%, 90%, 95%, 97%, 98%, 99%, or 100% sequence identity to any one of the alpha-amylases described supra (e.g., any one of SEQ ID NOs: 76-101, 121-174, 231 and 251-256).

[0426] Examples of suitable amino acid changes, such as conservative substitutions that do not significantly affect the folding and/or activity of the alpha-amylase, are described herein.

[0427] In one embodiment, the alpha-amylase has a mature polypeptide sequence that differs by no more than ten amino acids, e.g., by no more than five amino acids, by no more than four amino acids, by no more than three amino acids, by no more than two amino acids, or by one amino acid from the amino acid sequence of any one of the alpha-amylases described supra (e.g., any one of SEQ ID NOs: 76-101,121-174,231 and 251-256). In one embodiment, the alpha-amylase has an amino acid substitution, deletion, and/or insertion of one or more (e.g., two, several) of amino acid sequence of any one of the alpha-amylases described supra (e.g., any one of SEQ ID NOs: 76-101, 121-174, 231 and 251-256). In some embodiments, the total number of amino acid substitutions, deletions and/or insertions is not more than 10, e.g., not more than 9, 8, 7, 6, 5, 4, 3, 2, or 1.

[0428] In some embodiments, the alpha-amylase has at least 20%, e.g., at least 40%, at least 50%, at least 60%, at least 70%, at least 80%, at least 90%, at least 95%, at least 96%, at least 97%, at least 98%, at least 99%, or 100% of the alpha-amylase activity of any alpha-amylase described or referenced herein (e.g., any one of SEQ ID NOs: 76-101, 121-174, 231 and 251-256) under the same conditions.

[0429] In one embodiment, the alpha-amylase coding sequence hybridizes under at least low stringency conditions, e.g., medium stringency conditions, medium-high stringency conditions, high stringency conditions, or very high stringency conditions with the full-length complementary strand of the coding sequence from any alpha-amylase described or referenced herein (e.g., any one of SEQ ID NOs: 76-101, 121-174 and 231). In one embodiment, the alpha-amylase coding sequence has at least 65%, e.g., at least 70%, at least 75%, at least 80%, at least 85%, at least 85%, at least 90%, at least 91%, at least 92%, at least 93%, at least 94%, at least 95%, at least 96%, at least 97%, at least 98%, at least 99%, or 100% sequence identity with the coding sequence from any alpha-amylase described or referenced herein (e.g., any one of SEQ ID NOs: 76-101, 121-174, 231 and 251-256).

[0430] In one embodiment, the alpha-amylase comprises the coding sequence of any alpha-amylase described or referenced herein (any one of SEQ ID NOs: 76-101, 121-174, 231 and 251-256). In one embodiment, the alpha-amylase comprises a coding sequence that is a subsequence of the coding sequence from any alpha-amylase described or referenced herein, wherein the subsequence encodes a polypeptide having alpha-amylase activity. In one embodiment, the number of nucleotides residues in the subsequence is at least 75%, e.g., at least 80%, 85%, 90%, or 95% of the number of the referenced coding sequence.

[0431] The referenced alpha-amylase coding sequence of any related aspect or embodiment described herein can be the native coding sequence or a degenerate sequence, such as a codon-optimized coding sequence designed for use in a particular host cell (e.g., optimized for expression in Saccharomyces cerevisiae).

[0432] The alpha-amylase can also include fused polypeptides or cleavable fusion polypeptides, as described supra. In some embodiments, the alpha-amylase is a fusion protein comprising a signal peptide linked to the N-terminus of a mature polypeptide, such as any signal sequences described in U.S. Provisional Application No. 62/883,519 filed Aug. 6, 2019 and entitled “Fusion Proteins For Improved Enzyme Expression” (the content of which is hereby incorporated by reference).

### Phospholipases

[0433] The host cells and fermenting organisms may express a heterologous phospholipase. The phospholipase may be any phospholipase that is suitable for the host cells, fermenting organism, and/or the methods described herein, such as a naturally occurring phospholipase (e.g., a native phospholipase from another species or an endogenous phospholipase expressed from a modified expression vector) or a variant thereof that retains phospholipase activity. Any phospholipase contemplated for expression by a host cell or fermenting organism described below is also contemplated for embodiments of the invention involving exogenous addition of a phospholipase (e.g., added before, during or after liquefaction and/or saccharification).

[0434] In some embodiments, the host cell or fermenting organism comprises a heterologous polynucleotide encoding a phospholipase, for example, as described in WO2018/075430, the content of which is hereby incorporated by reference. In some embodiments, the phospholipase is classified as a phospholipase A. In other embodiments, the phospholipase is classified as a phospholipase C. Any phospholipase described or referenced herein is contemplated for expression in the host cell or fermenting organism.

[0435] In some embodiments, the host cell or fermenting organism comprising a heterologous polynucleotide encoding a phospholipase has an increased level of phospholipase activity compared to the host cells without the heterologous polynucleotide encoding the phospholipase, when cultivated under the same conditions. In some embodiments, the host cell or fermenting organism has an increased level of phospholipase activity of at least 5%, e.g., at least 10%, at least 15%, at least 20%, at least 25%, at least 50%, at least 100%, at least 150%, at least 200%, at least 300%, or at 500% compared to the host cell or fermenting organism without the heterologous polynucleotide encoding the phospholipase, when cultivated under the same conditions.

[0436] Exemplary phospholipases that can be used with the host cells and/or the methods described herein include bacterial, yeast, or filamentous fungal phospholipases, e.g., derived from any of the microorganisms described or referenced herein.

[0437] Additional phospholipases that may be expressed with the host cells and fermenting organisms, and used with the methods described herein, and include, but are not limited to phospholipases shown in Table 5 (or derivatives thereof).

TABLE 5

| Donor Organism | SEQ ID NO: |
|---|---|
| (catalytic domain) | (mature polypeptide) |
| Thermomyces lanuginosus | 235 |
| Talaromyces leycettanus | 236 |
| Penicillium emersonii | 237 |
| Bacillus thuringiensis | 238 |
| Pseudomonas sp. | 239 |
| Kionochaeta sp. | 240 |
| Mariannaea pinicola | 241 |
| Fictibacillus macauensis | 242 |

[0438] Additional phospholipases contemplated for use with the present invention can be found in WO02018/075430 (the content of which is incorporated herein).

[0439] Additional polynucleotides encoding suitable phospholipases may be obtained from microorganisms of any genus, including those readily available within the UniProtKB database.

[0440] The phospholipase coding sequences can also be used to design nucleic acid probes to identify and clone DNA encoding phospholipases from strains of different genera or species, as described supra.

[0441] The polynucleotides encoding phospholipases may also be identified and obtained from other sources including microorganisms isolated from nature (e.g., soil, composts, water, etc.) or DNA samples obtained directly from natural materials (e.g., soil, composts, water, etc.) as described supra.

[0442] Techniques used to isolate or clone polynucleotides encoding phospholipases are described supra.

[0443] In one embodiment, the phospholipase has a mature polypeptide sequence that comprises or consists of the amino acid sequence of any one of the phospholipases described or referenced herein (e.g., any one of SEQ ID NOs: 235, 236, 237, 238, 239, 240, 241, and 242). In another embodiment, the phospholipase has a mature polypeptide sequence that is a fragment of the any one of the phospholipases described or referenced herein (e.g., any one of SEQ ID NOs: 235, 236, 237, 238, 239, 240, 241, and 242). In one embodiment, the number of amino acid residues in the fragment is at least 75%, e.g., at least 80%, 85%, 90%, or 95% of the number of amino acid residues in referenced full length phospholipase (e.g. any one of SEQ ID NOs: 235, 236, 237, 238, 239, 240, 241, and 242). In other embodiments, the phospholipase may comprise the catalytic domain of any phospholipase described or referenced herein (e.g., the catalytic domain of any one of SEQ ID NOs: 235, 236, 237, 238, 239, 240, 241, and 242).

[0444] The phospholipase may be a variant of any one of the phospholipases described supra (e.g., any one of SEQ ID NOs: SEQ ID NOs: 235, 236, 237, 238, 239, 240, 241, and 242). In one embodiment, the phospholipase has a mature polypeptide sequence of at least 60%, e.g., at least 65%, 70%, 75%, 80%, 85%, 90%, 95%, 97%, 98%, 99%, or 100% sequence identity to any one of the phospholipases described supra (e.g., any one of SEQ ID NOs: 235, 236, 237, 238, 239, 240, 241, and 242).

[0445] Examples of suitable amino acid changes, such as conservative substitutions that do not significantly affect the folding and/or activity of the phospholipase, are described herein.

[0446] In one embodiment, the phospholipase has a mature polypeptide sequence that differs by no more than ten amino acids, e.g., by no more than five amino acids, by no more than four amino acids, by no more than three amino acids, by no more than two amino acids, or by one amino acid from the amino acid sequence of any one of the phospholipases described supra (e.g., any one of SEQ ID NOs: 235, 236, 237, 238, 239, 240, 241, and 242). In one embodiment, the phospholipase has an amino acid substitution, deletion, and/or insertion of one or more (e.g., two, several) of amino acid sequence of any one of the phospholipases described supra (e.g., any one of SEQ ID NOs: 235, 236, 237, 238, 239, 240, 241, and 242). In some embodiments, the total number of amino acid substitutions, deletions and/or insertions is not more than 10, e.g., not more than 9, 8, 7, 6, 5, 4, 3, 2, or 1.

[0447] In some embodiments, the phospholipase has at least 20%, e.g., at least 40%, at least 50%, at least 60%, at least 70%, at least 80%, at least 90%, at least 95%, at least 96%, at least 97%, at least 98%, at least 99%, or 100% of the phospholipase activity of any phospholipase described or referenced herein (e.g., any one of SEQ ID NOs: 235, 236, 237, 238, 239, 240, 241, and 242) under the same conditions.

[0448] In one embodiment, the phospholipase coding sequence hybridizes under at least low stringency conditions, e.g., medium stringency conditions, medium-high stringency conditions, high stringency conditions, or very high stringency conditions with the full-length complementary strand of the coding sequence from any phospholipase described or referenced herein (e.g., a coding sequence for a phospholipase of SEQ ID NO: 235, 236, 237, 238, 239, 240, 241 or 242). In one embodiment, the phospholipase coding sequence has at least 65%, e.g., at least 70%, at least 75%, at least 80%, at least 85%, at least 85%, at least 90%, at least 91%, at least 92%, at least 93%, at least 94%, at least 95%, at least 96%, at least 97%, at least 98%, at least 99%, or 100% sequence identity with the coding sequence from any phospholipase described or referenced herein (e.g., a coding sequence for a phospholipase of SEQ ID NO: 235, 236, 237, 238, 239, 240, 241 or 242).

[0449] In one embodiment, the phospholipase comprises the coding sequence of any phospholipase described or referenced herein (e.g., a coding sequence for a phospholipase of SEQ ID NO: 235, 236, 237, 238, 239, 240, 241 or 242). In one embodiment, the phospholipase comprises a coding sequence that is a subsequence of the coding sequence from any phospholipase described or referenced herein, wherein the subsequence encodes a polypeptide having phospholipase activity. In one embodiment, the number of nucleotides residues in the subsequence is at least 75%, e.g., at least 80%, 85%, 90%, or 95% of the number of the referenced coding sequence.

[0450] The referenced phospholipase coding sequence of any related aspect or embodiment described herein can be the native coding sequence or a degenerate sequence, such as a codon-optimized coding sequence designed for use in a particular host cell (e.g., optimized for expression in Saccharomyces cerevisiae).

[0451] The phospholipase can also include fused polypeptides or cleavable fusion polypeptides, as described supra. In some embodiments, the phospholipase is a fusion protein comprising a signal peptide linked to the N-terminus of a mature polypeptide, such as any signal sequences described in U.S. Provisional Application No. 62/883,519 filed Aug. 6, 2019 and entitled “Fusion Proteins For Improved Enzyme Expression” (the content of which is hereby incorporated by reference).

### Trehalases

[0452] The host cells and fermenting organisms may express a heterologous trehalase. The trehalase can be any trehalase that is suitable for the host cells, fermenting organisms and/or their methods of use described herein, such as a naturally occurring trehalase or a variant thereof that retains trehalase activity. Any trehalase contemplated for expression by a host cell or fermenting organism described below is also contemplated for embodiments of the invention involving exogenous addition of a trehalase (e.g., added before, during or after liquefaction and/or saccharification).

[0453] In some embodiments, the host cell or fermenting organism comprising a heterologous polynucleotide encoding a trehalase has an increased level of trehalase activity compared to the host cells without the heterologous polynucleotide encoding the trehalase, when cultivated under the same conditions. In some embodiments, the host cell or fermenting organism has an increased level of trehalase activity of at least 5%, e.g., at least 10%, at least 15%, at least 20%, at least 25%, at least 50%, at least 100%, at least 150%, at least 200%, at least 300%, or at 500% compared to the host cell or fermenting organism without the heterologous polynucleotide encoding the trehalase, when cultivated under the same conditions.

[0454] Trehalases that may be expressed with the host cells and fermenting organisms, and used with the methods described herein include, but are not limited to, trehalases shown in Table 6 (or derivatives thereof).

TABLE 6

| Donor Organism | SEQ ID NO: |
|---|---|
| (catalytic domain) | (mature polypeptide) |
| Chaetomium megalocarpum | 175 |
| Lecanicillium psalliotae | 176 |
| Doratomyces sp | 177 |
| Mucor moelleri | 178 |
| Phialophora cyclaminis | 179 |
| Thielavia arenaria | 180 |
| Thielavia antarctica | 181 |
| Chaetomium sp | 182 |
| Chaetomium nigricolor | 183 |
| Chaetomium jodhpurense | 184 |
| Chaetomium piluliferum | 185 |
| Myceliophthora hinnulea | 186 |
| Chloridium virescens | 187 |
| Gelasinospora cratophora | 188 |
| Acidobacteriaceae bacterium | 189 |
| Acidobacterium capsulatum | 190 |
| Acidovorax wautersii | 191 |
| Xanthomonas arboricola | 192 |
| Kosakonia sacchari | 193 |
| Enterobacter sp | 194 |
| Saitozyma flava | 195 |
| Phaeotremella skinneri | 196 |
| Trichoderma asperellum | 197 |
| Corynascus sepedonium | 198 |
| Myceliophthora thermophila | 199 |
| Trichoderma reesei | 200 |
| Chaetomium virescens | 201 |
| Rhodothermus marinus | 202 |
| Myceliophthora sepedonium | 203 |
| Moelleriella libera | 204 |
| Acremonium dichromosporum | 205 |
| Fusarium sambucinum | 206 |
| Phoma sp | 207 |
| Lentinus similis | 208 |
| Diaporthe nobilis | 209 |
| Solicoccozyma terricola | 210 |
| Dioszegia cryoxerica | 211 |
| Talaromyces funiculosus | 212 |
| Hamigera avellanea | 213 |
| Talaromyces ruber | 214 |
| Trichoderma lixii | 215 |
| Aspergillus cervinus | 216 |
| Rasamsonia brevistipitata | 217 |
| Acremonium curvulum | 218 |
| Talaromyces piceae | 219 |
| Penicillium sp | 220 |
| Talaromyces aurantiacus | 221 |
| Talaromyces pinophilus | 222 |
| Talaromyces leycettanus | 223 |
| Talaromyces variabilis | 224 |
| Aspergillus niger | 225 |
| Trichoderma reesei | 226 |

[0455] Additional polynucleotides encoding suitable trehalases may be derived from microorganisms of any suitable genus, including those readily available within the UniProtKB database.

[0456] The trehalase coding sequences can also be used to design nucleic acid probes to identify and clone DNA encoding trehalases from strains of different genera or species, as described supra.

[0457] The polynucleotides encoding trehalases may also be identified and obtained from other sources including microorganisms isolated from nature (e.g., soil, composts, water, etc.) or DNA samples obtained directly from natural materials (e.g., soil, composts, water, etc.) as described supra.

[0458] Techniques used to isolate or clone polynucleotides encoding trehalases are described supra.

[0459] In one embodiment, the trehalase has a mature polypeptide sequence that comprises or consists of the amino acid sequence of any one of the trehalases described or referenced herein (e.g., any one of SEQ ID NOs: 175-226). In another embodiment, the trehalase has a mature polypeptide sequence that is a fragment of the any one of the trehalases described or referenced herein (e.g., any one of SEQ ID NOs: 175-226). In one embodiment, the number of amino acid residues in the fragment is at least 75%, e.g., at least 80%, 85%, 90%, or 95% of the number of amino acid residues in referenced full length trehalase (e.g. any one of SEQ ID NOs: 175-226). In other embodiments, the trehalase may comprise the catalytic domain of any trehalase described or referenced herein (e.g., the catalytic domain of any one of SEQ ID NOs: 175-226).

[0460] The trehalase may be a variant of any one of the trehalases described supra (e.g., any one of SEQ ID NOs: 175-226). In one embodiment, the trehalase has a mature polypeptide sequence of at least 60%, e.g., at least 65%, 70%, 75%, 80%, 85%, 90%, 95%, 97%, 98%, 99%, or 100% sequence identity to any one of the trehalases described supra (e.g., any one of SEQ ID NOs: 175-226).

[0461] Examples of suitable amino acid changes, such as conservative substitutions that do not significantly affect the folding and/or activity of the trehalase, are described herein.

[0462] In one embodiment, the trehalase has a mature polypeptide sequence that differs by no more than ten amino acids, e.g., by no more than five amino acids, by no more than four amino acids, by no more than three amino acids, by no more than two amino acids, or by one amino acid from the amino acid sequence of any one of the trehalases described supra (e.g., any one of SEQ ID NOs: 175-226). In one embodiment, the trehalase has an amino acid substitution, deletion, and/or insertion of one or more (e.g., two, several) of amino acid sequence of any one of the trehalases described supra (e.g., any one of SEQ ID NOs: 175-226). In some embodiments, the total number of amino acid substitutions, deletions and/or insertions is not more than 10, e.g., not more than 9, 8, 7, 6, 5, 4, 3, 2, or 1.

[0463] In some embodiments, the trehalase has at least 20%, e.g., at least 40%, at least 50%, at least 60%, at least 70%, at least 80%, at least 90%, at least 95%, at least 96%, at least 97%, at least 98%, at least 99%, or 100% of the trehalase activity of any trehalase described or referenced herein (e.g., any one of SEQ ID NOs: 175-226) under the same conditions.

[0464] In one embodiment, the trehalase coding sequence hybridizes under at least low stringency conditions, e.g., medium stringency conditions, medium-high stringency conditions, high stringency conditions, or very high stringency conditions with the full-length complementary strand of the coding sequence from any trehalase described or referenced herein (e.g., any one of SEQ ID NOs: 175-226). In one embodiment, the trehalase coding sequence has at least 65%, e.g., at least 70%, at least 75%, at least 80%, at least 85%, at least 85%, at least 90%, at least 91%, at least 92%, at least 93%, at least 94%, at least 95%, at least 96%, at least 97%, at least 98%, at least 99%, or 100% sequence identity with the coding sequence from any trehalase described or referenced herein (e.g., any one of SEQ ID NOs: 175-226).

[0465] In one embodiment, the trehalase comprises the coding sequence of any trehalase described or referenced herein (any one of SEQ ID NOs: 175-226). In one embodiment, the trehalase comprises a coding sequence that is a subsequence of the coding sequence from any trehalase described or referenced herein, wherein the subsequence encodes a polypeptide having trehalase activity. In one embodiment, the number of nucleotides residues in the subsequence is at least 75%, e.g., at least 80%, 85%, 90%, or 95% of the number of the referenced coding sequence.

[0466] The referenced trehalase coding sequence of any related aspect or embodiment described herein can be the native coding sequence or a degenerate sequence, such as a codon-optimized coding sequence designed for use in a particular host cell (e.g., optimized for expression in Saccharomyces cerevisiae).

[0467] The trehalase can also include fused polypeptides or cleavable fusion polypeptides, as described supra. In some embodiments, the trehalase is a fusion protein comprising a signal peptide linked to the N-terminus of a mature polypeptide, such as any signal sequences described in U.S. Provisional Application No. 62/883,519 filed Aug. 6, 2019 and entitled “Fusion Proteins For Improved Enzyme Expression” (the content of which is hereby incorporated by reference).

### Proteases

[0468] The host cells and fermenting organisms may express a heterologous protease. The protease can be any protease that is suitable for the host cells and fermenting organisms and/or their methods of use described herein, such as a naturally occurring protease or a variant thereof that retains protease activity. Any protease contemplated for expression by a host cell or fermenting organism described below is also contemplated for embodiments of the invention involving exogenous addition of a protease (e.g., added before, during or after liquefaction and/or saccharification).

[0469] Proteases are classified on the basis of their catalytic mechanism into the following groups: Serine proteases (S), Cysteine proteases (C), Aspartic proteases (A), Metallo proteases (M), and Unknown, or as yet unclassified, proteases (U), see Handbook of Proteolytic Enzymes, A. J. Barrett, N. D. Rawlings, J. F. Woessner (eds), Academic Press (1998), in particular the general introduction part.

[0470] Protease activity can be measured using any suitable assay, in which a substrate is employed, that includes peptide bonds relevant for the specificity of the protease in question.

[0471] Assay-pH and assay-temperature are likewise to be adapted to the protease in question. Examples of assay-pH-values are pH 6, 7, 8, 9, 10, or 11. Examples of assay-temperatures are 30, 35, 37, 40, 45, 50, 55, 60, 65, 70 or 80° C.

[0472] In some embodiments, the host cell or fermenting organism comprising a heterologous polynucleotide encoding a protease has an increased level of protease activity compared to the host cell or fermenting organism without the heterologous polynucleotide encoding the protease, when cultivated under the same conditions. In some embodiments, the host cell or fermenting organism has an increased level of protease activity of at least 5%, e.g., at least 10%, at least 15%, at least 20%, at least 25%, at least 50%, at least 100%, at least 150%, at least 200%, at least 300%, or at 500% compared to the host cell or fermenting organism without the heterologous polynucleotide encoding the protease, when cultivated under the same conditions.

[0473] Exemplary proteases that may be expressed with the host cells and fermenting organisms, and used with the methods described herein include, but are not limited to, proteases shown in Table 7 (or derivatives thereof).

TABLE 7

| Donor Organism | SEQ ID NO: | |
|---|---|---|
| (catalytic domain) | (mature polypeptide) | Family |
| Aspergillus niger | 9 | A1 |
| Trichoderma reesei | 10 | |
| Thermoascus aurantiacus | 11 | M35 |
| Dichomitus squalens | 12 | S53 |
| Nocardiopsis prasina | 13 | S1 |
| Penicillium simplicissimum | 14 | S10 |
| Aspergillus niger | 15 | |
| Meriphilus giganteus | 16 | S53 |
| Lecanicillium sp. WMM742 | 17 | S53 |
| Talaromyces proteolyticus | 18 | S53 |
| Penicillium ranomafanaense | 19 | A1A |
| Aspergillus oryzae | 20 | S53 |
| Talaromyces liani | 21 | S10 |
| Thermoascus thermophilus | 22 | S53 |
| Pyrococcus furiosus | 23 | |
| Trichoderma reesei | 24 | |
| Rhizomucor miehei | 25 | |
| Lenzites betulinus | 26 | S53 |
| Neolentinus lepideus | 27 | S53 |
| Thermococcus sp. | 28 | S8 |
| Thermococcus sp. | 29 | S8 |
| Thermomyces lanuginosus | 30 | S53 |
| Thermococcus thioreducens | 31 | S53 |
| Polyporus arcularius | 32 | S53 |
| Ganoderma lucidum | 33 | S53 |
| Ganoderma lucidum | 34 | S53 |
| Ganoderma lucidum | 35 | S53 |
| Trametes sp. AH28-2 | 36 | S53 |
| Cinereomyces lindbladii | 37 | S53 |
| Trametes versicolor O82DDP | 38 | S53 |
| Paecilomyces hepiali | 39 | S53 |
| Isaria tenuipes | 40 | S53 |
| Aspergillus tamarii | 41 | S53 |
| Aspergillus brasiliensis | 42 | S53 |
| Aspergillus iizukae | 43 | S53 |
| Penicillium sp-72364 | 44 | S10 |
| Aspergillus denticulatus | 45 | S10 |
| Hamigera sp. t184-6 | 46 | S10 |
| Penicillium janthinellum | 47 | S10 |
| Penicillium vasconiae | 48 | S10 |
| Hamigera paravellanea | 49 | S10 |
| Talaromyces variabilis | 50 | S10 |
| Penicillium arenicola | 51 | S10 |
| Nocardiopsis kunsanensis | 52 | S1 |
| Streptomyces parvulus | 53 | S1 |
| Saccharopolyspora endophytica | 54 | S1 |
| luteus cell wall enrichments K | 55 | S1 |
| Saccharothrix australiensis | 56 | S1 |
| Nocardiopsis baichengensis | 57 | S1 |
| Streptomyces sp. SM15 | 58 | S1 |
| Actinoalloteichus spitiensis | 59 | S1 |
| Byssochlamys verrucosa | 60 | M35 |
| Hamigera terricola | 61 | M35 |
| Aspergillus tamarii | 62 | M35 |
| Aspergillus niveus | 63 | M35 |
| Penicillium sclerotiorum | 64 | A1 |
| Penicillium bilaiae | 65 | A1 |
| Penicillium antarcticum | 66 | A1 |
| Penicillium sumatrense | 67 | A1 |
| Trichoderma lixii | 68 | A1 |
| Trichoderma brevicompactum | 69 | A1 |
| Penicillium cinnamopurpureum | 70 | A1 |
| Bacillus licheniformis | 71 | S8 |
| Bacillus subtilis | 72 | S8 |
| Trametes cf versicol | 73 | S53 |

[0474] Additional polynucleotides encoding suitable proteases may be derived from microorganisms of any suitable genus, including those readily available within the UniProtKB database.

[0475] In one embodiment, the protease is derived from Aspergillus, such as the Aspergillus niger protease of SEQ ID NO: 9, the Aspergillus tamarii protease of SEQ ID NO: 41, or the Aspergillus denticulatus protease of SEQ ID NO: 45. In one embodiment, the protease is derived from Dichomitus, such as the Dichomitus squalens protease of SEQ ID NO: 12. In one embodiment, the protease is derived from Penicillium, such as the Penicillium simplicissimum protease of SEQ ID NO: 14, the Penicillium antarcticum protease of SEQ ID NO: 66, or the Penicillium sumatrense protease of SEQ ID NO: 67. In one embodiment, the protease is derived from Meriphilus, such as the Meriphilus giganteus protease of SEQ ID NO: 16. In one embodiment, the protease is derived from Talaromyces, such as the Talaromyces liani protease of SEQ ID NO: 21. In one embodiment, the protease is derived from Thermoascus, such as the Thermoascus thermophilus protease of SEQ ID NO: 22. In one embodiment, the protease is derived from Ganoderma, such as the Ganoderma lucidum protease of SEQ ID NO: 33. In one embodiment, the protease is derived from Hamigera, such as the Hamigera terricola protease of SEQ ID NO: 61. In one embodiment, the protease is derived from Trichoderma, such as the Trichoderma brevicompactum protease of SEQ ID NO: 69.

[0476] The protease coding sequences can also be used to design nucleic acid probes to identify and clone DNA encoding proteases from strains of different genera or species, as described supra.

[0477] The polynucleotides encoding proteases may also be identified and obtained from other sources including microorganisms isolated from nature (e.g., soil, composts, water, etc.) or DNA samples obtained directly from natural materials (e.g., soil, composts, water, etc.) as described supra.

[0478] Techniques used to isolate or clone polynucleotides encoding proteases are described supra.

[0479] In one embodiment, the protease has a mature polypeptide sequence that comprises or consists of the amino acid sequence of any one of SEQ ID NOs: 9-73 (e.g., any one of SEQ ID NOs: 9, 14, 16, 21, 22, 33, 41, 45, 61, 62, 66, 67, and 69; such as any one of SEQ NOs: 9, 14, 16, and 69). In another embodiment, the protease has a mature polypeptide sequence that is a fragment of the protease of any one of SEQ ID NOs: 9-73 (e.g., wherein the fragment has protease activity). In one embodiment, the number of amino acid residues in the fragment is at least 75%, e.g., at least 80%, 85%, 90%, or 95% of the number of amino acid residues in referenced full length protease (e.g. any one of SEQ ID NOs: 9-73). In other embodiments, the protease may comprise the catalytic domain of any protease described or referenced herein (e.g., the catalytic domain of any one of SEQ ID NOs: 9-73).

[0480] The protease may be a variant of any one of the proteases described supra (e.g., any one of SEQ ID NOs: 9-73. In one embodiment, the protease has a mature polypeptide sequence of at least 60%, e.g., at least 65%, 70%, 75%, 80%, 85%, 90%, 95%, 97%, 98%, 99%, or 100% sequence identity to any one of the proteases described supra (e.g., any one of SEQ ID NOs: 9-73).

[0481] Examples of suitable amino acid changes, such as conservative substitutions that do not significantly affect the folding and/or activity of the protease, are described herein.

[0482] In one embodiment, the protease has a mature polypeptide sequence that differs by no more than ten amino acids, e.g., by no more than five amino acids, by no more than four amino acids, by no more than three amino acids, by no more than two amino acids, or by one amino acid from the amino acid sequence of any one of the proteases described supra (e.g., any one of SEQ ID NOs: 9-73). In one embodiment, the protease has an amino acid substitution, deletion, and/or insertion of one or more (e.g., two, several) of amino acid sequence of any one of the proteases described supra (e.g., any one of SEQ ID NOs: 9-73). In some embodiments, the total number of amino acid substitutions, deletions and/or insertions is not more than 10, e.g., not more than 9, 8, 7, 6, 5, 4, 3, 2, or 1.

[0483] In one embodiment, the protease coding sequence hybridizes under at least low stringency conditions, e.g., medium stringency conditions, medium-high stringency conditions, high stringency conditions, or very high stringency conditions with the full-length complementary strand of the coding sequence from any protease described or referenced herein (e.g., any one of SEQ ID NOs: 9-73). In one embodiment, the protease coding sequence has at least 65%, e.g., at least 70%, at least 75%, at least 80%, at least 85%, at least 85%, at least 90%, at least 91%, at least 92%, at least 93%, at least 94%, at least 95%, at least 96%, at least 97%, at least 98%, at least 99%, or 100% sequence identity with the coding sequence from any protease described or referenced herein (e.g., any one of SEQ ID NOs: 9-73).

[0484] In one embodiment, the protease comprises the coding sequence of any protease described or referenced herein (any one of SEQ ID NOs: 9-73). In one embodiment, the protease comprises a coding sequence that is a subsequence of the coding sequence from any protease described or referenced herein, wherein the subsequence encodes a polypeptide having protease activity. In one embodiment, the number of nucleotides residues in the subsequence is at least 75%, e.g., at least 80%, 85%, 90%, or 95% of the number of the referenced coding sequence.

[0485] The referenced protease coding sequence of any related aspect or embodiment described herein can be the native coding sequence or a degenerate sequence, such as a codon-optimized coding sequence designed for use in a particular host cell (e.g., optimized for expression in Saccharomyces cerevisiae).

[0486] The protease can also include fused polypeptides or cleavable fusion polypeptides, as described supra. In some embodiments, the protease is a fusion protein comprising a signal peptide linked to the N-terminus of a mature polypeptide, such as any signal sequences described in U.S. Provisional Application No. 62/883,519 filed Aug. 6, 2019 and entitled “Fusion Proteins For Improved Enzyme Expression” (the content of which is hereby incorporated by reference).

[0487] In one embodiment, the protease used according to a process described herein is a Serine proteases. In one particular embodiment, the protease is a serine protease belonging to the family 53, e.g., an endo-protease, such as S53 protease from Meiphilus giganteus, Dichomitus squalens Trametes versicolor, Polyporus arcularius, Lenzites betulinus, Ganoderma lucidum, Neolentinus lepideus, or Bacillus sp. 19138, in a process for producing ethanol from a starch-containing material, the ethanol yield was improved, when the S53 protease was present/or added during saccharification and/or fermentation of either gelatinized or un-gelatinized starch. In one embodiment, the proteases is selected from: (a) proteases belonging to the EC 3.4.21 enzyme group; and/or (b) proteases belonging to the EC 3.4.14 enzyme group; and/or (c) Serine proteases of the peptidase family S53 that comprises two different types of peptidases: tripeptidyl aminopeptidases (exo-type) and endo-peptidases; as described in 1993, Biochem. J. 290:205-218 and in MEROPS protease database, release, 9.4 (31 Jan. 2011) (www.merops.ac.uk). The database is described in Rawlings, N. D., Barrett, A. J. and Bateman, A., 2010, “MEROPS: the peptidase database”, Nucl. Acids Res. 38: D227-D233.

[0488] For determining whether a given protease is a Serine protease, and a family S53 protease, reference is made to the above Handbook and the principles indicated therein. Such determination can be carried out for all types of proteases, be it naturally occurring or wild-type proteases; or genetically engineered or synthetic proteases.

[0489] Peptidase family S53 contains acid-acting endopeptidases and tripeptidyl-peptidases. The residues of the catalytic triad are Glu, Asp, Ser, and there is an additional acidic residue, Asp, in the oxyanion hole. The order of the residues is Glu, Asp, Asp, Ser. The Ser residue is the nucleophile equivalent to Ser in the Asp, His, Ser triad of subtilisin, and the Glu of the triad is a substitute for the general base, His, in subtilisin.

[0490] The peptidases of the S53 family tend to be most active at acidic pH (unlike the homologous subtilisins), and this can be attributed to the functional importance of carboxylic residues, notably Asp in the oxyanion hole. The amino acid sequences are not closely similar to those in family S8 (i.e. serine endopeptidase subtilisins and homologues), and this, taken together with the quite different active site residues and the resulting lower pH for maximal activity, provides for a substantial difference to that family. Protein folding of the peptidase unit for members of this family resembles that of subtilisin, having the clan type SB.

[0491] In one embodiment, the protease used according to a process described herein is a Cysteine proteases.

[0492] In one embodiment, the protease used according to a process described herein is a Aspartic proteases. Aspartic acid proteases are described in, for example, Hand-book of Proteolytic En-zymes, Edited by A. J. Barrett, N. D. Rawlings and J. F. Woessner, Aca-demic Press, San Diego, 1998, Chapter 270). Suitable examples of aspartic acid protease include, e.g., those disclosed in R. M. Berka et al. Gene, 96, 313 (1990)); (R. M. Berka et al. Gene, 125, 195-198 (1993)); and Gomi et al. Biosci. Biotech. Biochem. 57, 1095-1100 (1993), which are hereby incorporated by reference.

[0493] The protease also may be a metalloprotease, which is defined as a protease selected from the group consisting of:

[0494] (a) proteases belonging to EC 3.4.24 (metalloendopeptidases); preferably EC 3.4.24.39 (acid metallo proteinases);

[0495] (b) metalloproteases belonging to the M group of the above Handbook;

[0496] (c) metalloproteases not yet assigned to clans (designation: Clan MX), or belonging to either one of clans MA, MB, MC, MD, ME, MF, MG, MH (as defined at pp. 989-991 of the above Handbook);

[0497] (d) other families of metalloproteases (as defined at pp. 1448-1452 of the above Handbook);

[0498] (e) metalloproteases with a HEXXH motif;

[0499] (f) metalloproteases with an HEFTH motif;

[0500] (g) metalloproteases belonging to either one of families M3, M26, M27, M32, M34, M35, M36, M41, M43, or M47 (as defined at pp. 1448-1452 of the above Handbook);

[0501] (h) metalloproteases belonging to the M28E family; and

[0502] (i) metalloproteases belonging to family M35 (as defined at pp. 1492-1495 of the above Handbook).

[0503] In other particular embodiments, metalloproteases are hydrolases in which the nucleophilic attack on a peptide bond is mediated by a water molecule, which is activated by a divalent metal cation. Examples of divalent cations are zinc, cobalt or manganese. The metal ion may be held in place by amino acid ligands. The number of ligands may be five, four, three, two, one or zero. In a particular embodiment the number is two or three, preferably three.

[0504] There are no limitations on the origin of the metalloprotease used in a process of the invention. In an embodiment the metalloprotease is classified as EC 3.4.24, preferably EC 3.4.24.39. In one embodiment, the metalloprotease is an acid-stable metalloprotease, e.g., a fungal acid-stable metalloprotease, such as a metalloprotease derived from a strain of the genus Thermoascus, preferably a strain of Thermoascus aurantiacus, especially Thermoascus aurantiacus CGMCC No. 0670 (classified as EC 3.4.24.39). In another embodiment, the metalloprotease is derived from a strain of the genus Aspergillus, preferably a strain of Aspergillus oryzae.

[0505] In one embodiment the metalloprotease has a degree of sequence identity to amino acids −178 to 177, −159 to 177, or preferably amino acids 1 to 177 (the mature polypeptide) of SEQ ID NO: 1 of WO2010/008841 (a Thermoascus aurantiacus metalloprotease) of at least 80%, at least 82%, at least 85%, at least 90%, at least 95%, or at least 97%; and which have metalloprotease activity. In particular embodiments, the metalloprotease consists of an amino acid sequence with a degree of identity to SEQ ID NO: 1 as mentioned above.

[0506] The Thermoascus aurantiacus metalloprotease is a preferred example of a metalloprotease suitable for use in a process of the invention. Another metalloprotease is derived from Aspergillus oryzae and comprises the sequence of SEQ ID NO: 11 disclosed in WO2003/048353, or amino acids −23-353; −23-374; −23-397; 1-353; 1-374; 1-397; 177-353; 177-374; or 177-397 thereof, and SEQ ID NO: 10 disclosed in WO2003/048353.

[0507] Another metalloprotease suitable for use in a process of the invention is the Aspergillus oryzae metalloprotease comprising SEQ ID NO: 5 of WO2010/008841, or a metalloprotease is an isolated polypeptide which has a degree of identity to SEQ ID NO: 5 of at least about 80%, at least 82%, at least 85%, at least 90%, at least 95%, or at least 97%; and which have metalloprotease activity. In particular embodiments, the metalloprotease consists of the amino acid sequence of SEQ ID NO: 5 of WO2010/008841.

[0508] In a particular embodiment, a metalloprotease has an amino acid sequence that differs by forty, thirty-five, thirty, twenty-five, twenty, or by fifteen amino acids from amino acids −178 to 177, −159 to 177, or +1 to 177 of the amino acid sequences of the Thermoascus aurantiacus or Aspergillus oryzae metalloprotease.

[0509] In another embodiment, a metalloprotease has an amino acid sequence that differs by ten, or by nine, or by eight, or by seven, or by six, or by five amino acids from amino acids −178 to 177, −159 to 177, or +1 to 177 of the amino acid sequences of these metalloproteases, e.g., by four, by three, by two, or by one amino acid.

[0510] In particular embodiments, the metalloprotease a) comprises or b) consists of

[0511] i) the amino acid sequence of amino acids −178 to 177, −159 to 177, or +1 to 177 of SEQ ID NO:1 of WO2010/008841;

[0512] ii) the amino acid sequence of amino acids −23-353, −23-374, −23-397, 1-353, 1-374, 1-397, 177-353, 177-374, or 177-397 of SEQ ID NO: 3 of WO2010/008841;

[0513] iii) the amino acid sequence of SEQ ID NO: 5 of WO2010/008841; or allelic variants, or fragments, of the sequences of i), ii), and iii) that have protease activity.

[0514] A fragment of amino acids −178 to 177, −159 to 177, or +1 to 177 of SEQ ID NO: 1 of WO02010/008841 or of amino acids −23-353, −23-374, −23-397, 1-353, 1-374, 1-397, 177-353, 177-374, or 177-397 of SEQ ID NO: 3 of WO2010/008841; is a polypeptide having one or more amino acids deleted from the amino and/or carboxyl terminus of these amino acid sequences. In one embodiment a fragment contains at least 75 amino acid residues, or at least 100 amino acid residues, or at least 125 amino acid residues, or at least 150 amino acid residues, or at least 160 amino acid residues, or at least 165 amino acid residues, or at least 170 amino acid residues, or at least 175 amino acid residues.

[0515] To determine whether a given protease is a metallo protease or not, reference is made to the above “Handbook of Proteolytic Enzymes” and the principles indicated therein. Such determination can be carried out for all types of proteases, be it naturally occurring or wild-type proteases; or genetically engineered or synthetic proteases.

[0516] The protease may be a variant of, e.g., a wild-type protease, having thermostability properties defined herein. In one embodiment, the thermostable protease is a variant of a metallo protease. In one embodiment, the thermostable protease used in a process described herein is of fungal origin, such as a fungal metallo protease, such as a fungal metallo protease derived from a strain of the genus Thermoascus, preferably a strain of Thermoascus aurantiacus, especially Thermoascus aurantiacus CGMCC No. 0670 (classified as EC 3.4.24.39).

[0517] In one embodiment, the thermostable protease is a variant of the mature part of the metallo protease shown in SEQ ID NO: 2 disclosed in WO2003/048353 or the mature part of SEQ ID NO: 1 in WO2010/008841 further with one of the following substitutions or combinations of substitutions:

[0518] S5*+D79L+S87P+A112P+D142L;

[0519] D79L+S87P+A112P+T124V+D142L;

[0520] S5*+N26R+D79L+S87P+A112P+D142L;

[0521] N26R+T46R+D79L+S87P+A112P+D142L;

[0522] T46R+D79L+S87P+T116V+D142L;

[0523] D79L+P81R+S87P+A112P+D142L;

[0524] A27K+D79L+S87P+A112P+T124V+D142L;

[0525] D79L+Y82F+S87P+A112P+T124V+D142L;

[0526] D79L+Y82F+S87P+A112P+T124V+D142L;

[0527] D79L+S87P+A112P+T124V+A126V+D142L;

[0528] D79L+S87P+A112P+D142L;

[0529] D79L+Y82F+S87P+A112P+D142L;

[0530] S38T+D79L+S87P+A112P+A126V+D142L;

[0531] D79L+Y82F+S87P+A112P+A126V+D142L;

[0532] A27K+D79L+S87P+A112P+A126V+D142L;

[0533] D79L+S87P+N98C+A112P+G135C+D142L;

[0534] D79L+S87P+A112P+D142L+T141C+M161C;

[0535] S36P+D79L+S87P+A112P+D142L;

[0536] A37P+D79L+S87P+A112P+D142L;

[0537] S49P+D79L+S87P+A112P+D142L;

[0538] S50P+D79L+S87P+A112P+D142L;

[0539] D79L+S87P+D104P+A112P+D142L;

[0540] D79L+Y82F+S87G+A112P+D142L;

[0541] S70V+D79L+Y82F+S87G+Y97W+A112P+D142L;

[0542] D79L+Y82F+S87G+Y97W+D104P+A112P+D142L;

[0543] S70V+D79L+Y82F+S87G+A112P+D142L;

[0544] D79L+Y82F+S87G+D104P+A112P+D142L;

[0545] D79L+Y82F+S87G+A112P+A126V+D142L;

[0546] Y82F+S87G+S70V+D79L+D104P+A112P+D142L;

[0547] Y82F+S87G+D79L+D104P+A112P+A126V+D142L;

[0548] A27K+D79L+Y82F+S87G+D104P+A112P+A126V+D142L;

[0549] A27K+Y82F+S87G+D104P+A112P+A126V+D142L;

[0550] A27K+D79L+Y82F+D104P+A112P+A126V+D142L;

[0551] A27K+Y82F+D104P+A112P+A126V+D142L;

[0552] A27K+D79L+S87P+A112P+D142L; and

[0553] D79L+S87P+D142L.

[0554] In one embodiment, the thermostable protease is a variant of the metallo protease disclosed as the mature part of SEQ ID NO: 2 disclosed in WO2003/048353 or the mature part of SEQ ID NO: 1 in WO02010/008841 with one of the following substitutions or combinations of substitutions:

[0555] D79L+S87P+A112P+D142L;

[0556] D79L+S87P+D142L; and

[0557] A27K+D79L+Y82F+S87G+D104P+A112P+A126V+D142L.

[0558] In one embodiment, the protease variant has at least 75% identity preferably at least 80%, more preferably at least 85%, more preferably at least 90%, more preferably at least 91%, more preferably at least 92%, even more preferably at least 93%, most preferably at least 94%, and even most preferably at least 95%, such as even at least 96%, at least 97%, at least 98%, at least 99%, but less than 100% identity to the mature part of the polypeptide of SEQ ID NO: 2 disclosed in WO2003/048353 or the mature part of SEQ ID NO: 1 in WO2010/008841.

[0559] The thermostable protease may also be derived from any bacterium as long as the protease has the thermostability properties.

[0560] In one embodiment, the thermostable protease is derived from a strain of the bacterium Pyrococcus, such as a strain of Pyrococcus furiosus (pfu protease).

[0561] In one embodiment, the protease is one shown as SEQ ID NO: 1 in U.S. Pat. No. 6,358,726-B1 (Takara Shuzo Company).

[0562] In one embodiment, the thermostable protease is a protease having a mature polypeptide sequence of at least 80% identity, such as at least 85%, such as at least 90%, such as at least 95%, such as at least 96%, such as at least 97%, such as at least 98%, such as at least 99% identity to SEQ ID NO: 1 in U.S. Pat. No. 6,358,726-B1. The Pyroccus furiosus protease can be purchased from Takara Bio, Japan.

[0563] The Pyrococcus furiosus protease may be a thermostable protease as described in SEQ ID NO: 13 of WO2018/098381. This protease (PfuS) was found to have a thermostability of 110% (80° C./70° C.) and 103% (90° C./70° C.) at pH 4.5 determined.

[0564] In one embodiment a thermostable protease used in a process described herein has a thermostability value of more than 20% determined as Relative Activity at 80° C./70° C. determined as described in Example 2 of WO2018098381.

[0565] In one embodiment, the protease has a thermostability of more than 30%, more than 40%, more than 50%, more than 60%, more than 70%, more than 80%, more than 90%, more than 100%, such as more than 105%, such as more than 110%, such as more than 115%, such as more than 120% determined as Relative Activity at 80° C./70° C.

[0566] In one embodiment, protease has a thermostability of between 20 and 50%, such as between 20 and 40%, such as 20 and 30% determined as Relative Activity at 80° C./70° C. In one embodiment, the protease has a thermostability between 50 and 115%, such as between 50 and 70%, such as between 50 and 60%, such as between 100 and 120%, such as between 105 and 115% determined as Relative Activity at 80° C./70° C.

[0567] In one embodiment, the protease has a thermostability value of more than 10% determined as Relative Activity at 85° C./70° C. determined as described in Example 2 of WO2018/098381.

[0568] In one embodiment, the protease has a thermostability of more than 10%, such as more than 12%, more than 14%, more than 16%, more than 18%, more than 20%, more than 30%, more than 40%, more that 50%, more than 60%, more than 70%, more than 80%, more than 90%, more than 100%, more than 110% determined as Relative Activity at 85° C./70° C.

[0569] In one embodiment, the protease has a thermostability of between 10% and 50%, such as between 10% and 30%, such as between 10% and 25% determined as Relative Activity at 85° C./70° C.

[0570] In one embodiment, the protease has more than 20%, more than 30%, more than 40%, more than 50%, more than 60%, more than 70%, more than 80%, more than 90% determined as Remaining Activity at 80° C.; and/or the protease has more than 20%, more than 30%, more than 40%, more than 50%, more than 60%, more than 70%, more than 80%, more than 90% determined as Remaining Activity at 84° C.

[0571] Determination of “Relative Activity” and “Remaining Activity” is done as described in Example 2 of WO2018/098381.

[0572] In one embodiment, the protease may have a thermostability for above 90, such as above 100 at 85° C. as determined using the Zein-BCA assay as disclosed in Example 3 of WO2018/098381.

[0573] In one embodiment, the protease has a thermostability above 60%, such as above 90%, such as above 100%, such as above 110% at 85° C. as determined using the Zein-BCA assay of WO2018/098381.

[0574] In one embodiment, protease has a thermostability between 60-120, such as between 70-120%, such as between 80-120%, such as between 90-120%, such as between 100-120%, such as 110-120% at 85° C. as determined using the Zein-BCA assay of WO2018/098381.

[0575] In one embodiment, the thermostable protease has at least 20%, such as at least 30%, such as at least 40%, such as at least 50%, such as at least 60%, such as at least 70%, such as at least 80%, such as at least 90%, such as at least 95%, such as at least 100% of the activity of the JTP196 protease variant or Protease Pfu determined by the AZCL-casein assay of WO2018/098381, and described herein.

[0576] In one embodiment, the thermostable protease has at least 20%, such as at least 30%, such as at least 40%, such as at least 50%, such as at least 60%, such as at least 70%, such as at least 80%, such as at least 90%, such as at least 95%, such as at least 100% of the protease activity of the Protease 196 variant or Protease Pfu determined by the AZCL-casein assay of WO2018/098381.

### Pullulanases

[0577] The host cells and fermenting organisms may express a heterologous pullulanase. The pullulanase can be any protease that is suitable for the host cells and fermenting organisms and/or their methods of use described herein, such as a naturally occurring pullulanase or a variant thereof that retains pullulanase activity. Any pullulanase contemplated for expression by a host cell or fermenting organism described below is also contemplated for embodiments of the invention involving exogenous addition of a pullulanase (e.g., added before, during or after liquefaction and/or saccharification).

[0578] In some embodiments, the host cell or fermenting organism comprising a heterologous polynucleotide encoding a pullulanase has an increased level of pullulanase activity compared to the host cells without the heterologous polynucleotide encoding the pullulanase, when cultivated under the same conditions. In some embodiments, the host cell or fermenting organism has an increased level of pullulanase activity of at least 5%, e.g., at least 10%, at least 15%, at least 20%, at least 25%, at least 50%, at least 100%, at least 150%, at least 200%, at least 300%, or at 500% compared to the host cell or fermenting organism without the heterologous polynucleotide encoding the pullulanase, when cultivated under the same conditions.

[0579] Exemplary pullulanases that can be used with the host cells and/or the methods described herein include bacterial, yeast, or filamentous fungal pullulanases, e.g., obtained from any of the microorganisms described or referenced herein.

[0580] Contemplated pullulanases include the pullulanases from Bacillus amyloderamificans disclosed in U.S. Pat. No. 4,560,651 (hereby incorporated by reference), the pullulanase disclosed as SEQ ID NO: 2 in WO 01/151620 (hereby incorporated by reference), the Bacillus deramificans disclosed as SEQ ID NO: 4 in WO 01/151620 (hereby incorporated by reference), and the pullulanase from Bacillus acidopullulyticus disclosed as SEQ ID NO: 6 in WO 01/151620 (hereby incorporated by reference) and also described in FEMS Mic. Let. (1994) 115, 97-106.

[0581] Additional pullulanases contemplated include the pullulanases from Pyrococcus woesei, specifically from Pyrococcus woesei DSM No. 3773 disclosed in WO92/02614.

[0582] In one embodiment, the pullulanase is a family GH57 pullulanase. In one embodiment, the pullulanase includes an X47 domain as disclosed in U.S. 61/289,040 published as WO02011/087836 (which are hereby incorporated by reference). More specifically the pullulanase may be derived from a strain of the genus Thermococcus, including Thermococcus litoralis and Thermococcus hydrothermalis, such as the Thermococcus hydrothermalis pullulanase truncated at site X4 right after the X47 domain (i.e., amino acids 1-782). The pullulanase may also be a hybrid of the Thermococcus litoralis and Thermococcus hydrothermalis pullulanases or a T. hydrothermalis/T. litoralis hybrid enzyme with truncation site X4 disclosed in U.S. 61/289,040 published as WO02011/087836 (which is hereby incorporated by reference).

[0583] In another embodiment, the pullulanase is one comprising an X46 domain disclosed in WO02011/076123 (Novozymes).

[0584] The pullulanase may be added in an effective amount which include the preferred amount of about 0.0001-10 mg enzyme protein per gram DS, preferably 0.0001-0.10 mg enzyme protein per gram DS, more preferably 0.0001-0.010 mg enzyme protein per gram DS.

[0585] Pullulanase activity may be determined as NPUN. An Assay for determination of NPUN is described in WO2018/098381.

[0586] Suitable commercially available pullulanase products include PROMOZYME D, PROMOZYME™ D2 (Novozymes A/S, Denmark), OPTIMAX L-300 (DuPont-Danisco, USA), and AMANO 8 (Amano, Japan).

[0587] In one embodiment, the pullulanase is derived from the Bacillus subtilis pullulanase of SEQ ID NO: 114. In one embodiment, the pullulanase is derived from the Bacillus licheniformis pullulanase of SEQ ID NO: 115. In one embodiment, the pullulanase is derived from the Oryza sativa pullulanase of SEQ ID NO: 116. In one embodiment, the pullulanase is derived from the Triticum aestivum pullulanase of SEQ ID NO: 117. In one embodiment, the pullulanase is derived from the Clostridium phytofermentans pullulanase of SEQ ID NO: 118. In one embodiment, the pullulanase is derived from the Streptomyces avermitilis pullulanase of SEQ ID NO: 119. In one embodiment, the pullulanase is derived from the Klebsiella pneumoniae pullulanase of SEQ ID NO: 120.

[0588] Additional pullulanases contemplated for use with the present invention can be found in WO2011/153516 (the content of which is incorporated herein).

[0589] Additional polynucleotides encoding suitable pullulanases may be obtained from microorganisms of any genus, including those readily available within the UniProtKB database.

[0590] The pullulanase coding sequences can also be used to design nucleic acid probes to identify and clone DNA encoding pullulanases from strains of different genera or species, as described supra.

[0591] The polynucleotides encoding pullulanases may also be identified and obtained from other sources including microorganisms isolated from nature (e.g., soil, composts, water, etc.) or DNA samples obtained directly from natural materials (e.g., soil, composts, water, etc.) as described supra.

[0592] Techniques used to isolate or clone polynucleotides encoding pullulanases are described supra.

[0593] In one embodiment, the pullulanase has a mature polypeptide sequence that comprises or consists of the amino acid sequence of any one of the pullulanases described or referenced herein (e.g., any one of SEQ ID NOs: 114-120). In another embodiment, the pullulanase has a mature polypeptide sequence that is a fragment of the any one of the pullulanases described or referenced herein (e.g., any one of SEQ ID NOs: 114-120). In one embodiment, the number of amino acid residues in the fragment is at least 75%, e.g., at least 80%, 85%, 90%, or 95% of the number of amino acid residues in referenced full length pullulanase. In other embodiments, the pullulanase may comprise the catalytic domain of any pullulanase described or referenced herein (e.g., any one of SEQ ID NOs: 114-120).

[0594] The pullulanase may be a variant of any one of the pullulanases described supra (e.g., any one of SEQ ID NOs: 114-120). In one embodiment, the pullulanase has a mature polypeptide sequence of at least 60%, e.g., at least 65%, 70%, 75%, 80%, 85%, 90%, 95%, 97%, 98%, 99%, or 100% sequence identity to any one of the pullulanases described supra (e.g., any one of SEQ ID NOs: 114-120).

[0595] Examples of suitable amino acid changes, such as conservative substitutions that do not significantly affect the folding and/or activity of the pullulanase, are described herein.

[0596] In one embodiment, the pullulanase has a mature polypeptide sequence that differs by no more than ten amino acids, e.g., by no more than five amino acids, by no more than four amino acids, by no more than three amino acids, by no more than two amino acids, or by one amino acid from the amino acid sequence of any one of the pullulanases described supra (e.g., any one of SEQ ID NOs: 114-120). In one embodiment, the pullulanase has an amino acid substitution, deletion, and/or insertion of one or more (e.g., two, several) of amino acid sequence of any one of the pullulanases described supra (e.g., any one of SEQ ID NOs: 114-120). In some embodiments, the total number of amino acid substitutions, deletions and/or insertions is not more than 10, e.g., not more than 9, 8, 7, 6, 5, 4, 3, 2, or 1.

[0597] In some embodiments, the pullulanase has at least 20%, e.g., at least 40%, at least 50%, at least 60%, at least 70%, at least 80%, at least 90%, at least 95%, at least 96%, at least 97%, at least 98%, at least 99%, or 100% of the pullulanase activity of any pullulanase described or referenced herein under the same conditions (e.g., any one of SEQ ID NOs: 114-120).

[0598] In one embodiment, the pullulanase coding sequence hybridizes under at least low stringency conditions, e.g., medium stringency conditions, medium-high stringency conditions, high stringency conditions, or very high stringency conditions with the full-length complementary strand of the coding sequence from any pullulanase described or referenced herein (e.g., any one of SEQ ID NOs: 114-120). In one embodiment, the pullulanase coding sequence has at least 65%, e.g., at least 70%, at least 75%, at least 80%, at least 85%, at least 85%, at least 90%, at least 91%, at least 92%, at least 93%, at least 94%, at least 95%, at least 96%, at least 97%, at least 98%, at least 99%, or 100% sequence identity with the coding sequence from any pullulanase described or referenced herein (e.g., any one of SEQ ID NOs: 114-120).

[0599] In one embodiment, the pullulanase comprises the coding sequence of any pullulanase described or referenced herein (e.g., any one of SEQ ID NOs: 114-120). In one embodiment, the pullulanase comprises a coding sequence that is a subsequence of the coding sequence from any pullulanase described or referenced herein, wherein the subsequence encodes a polypeptide having pullulanase activity. In one embodiment, the number of nucleotides residues in the subsequence is at least 75%, e.g., at least 80%, 85%, 90%, or 95% of the number of the referenced coding sequence.

[0600] The referenced pullulanase coding sequence of any related aspect or embodiment described herein can be the native coding sequence or a degenerate sequence, such as a codon-optimized coding sequence designed for use in a particular host cell (e.g., optimized for expression in Saccharomyces cerevisiae).

[0601] The pullulanase can also include fused polypeptides or cleavable fusion polypeptides, as described supra. In some embodiments, the pullulanase is a fusion protein comprising a signal peptide linked to the N-terminus of a mature polypeptide, such as any signal sequences described in U.S. Provisional Application No. 62/883,519 filed Aug. 6, 2019 and entitled “Fusion Proteins For Improved Enzyme Expression” (the content of which is hereby incorporated by reference).

### Gene Disruptions

[0602] The host cells and fermenting organisms described herein may also comprise one or more (e.g., two, several) gene disruptions, e.g., to divert sugar metabolism from undesired products to ethanol. In some embodiments, the recombinant host cells produce a greater amount of ethanol compared to the cell without the one or more disruptions when cultivated under identical conditions. In some embodiments, one or more of the disrupted endogenous genes is inactivated. In some embodiments, the host cell or fermenting organism is a diploid and has a disruption (e.g., inactivation) of both copies of the referenced gene.

[0603] In certain embodiments, the host cell or fermenting organism provided herein comprises a disruption of one or more endogenous genes encoding enzymes involved in producing alternate fermentative products such as glycerol or other byproducts such as acetate or diols. For example, the cells provided herein may comprise a disruption of one or more endogenous genes encoding a glycerol 3-phosphatase (GPP, E.C. 3.1.3.21, catalyzes conversion of glycerol-3 phosphate to glycerol), a glycerol 3-phosphate dehydrogenase (GPD, catalyzes reaction of dihydroxyacetone phosphate to glycerol 3-phosphate), glycerol kinase (catalyzes conversion of glycerol 3-phosphate to glycerol), dihydroxyacetone kinase (catalyzes conversion of dihydroxyacetone phosphate to dihydroxyacetone), glycerol dehydrogenase (catalyzes conversion of dihydroxyacetone to glycerol), and aldehyde dehydrogenase (ALD, e.g., converts acetaldehyde to acetate).

[0604] In some embodiments, the host cell or fermenting organism comprises a disruption to one or more endogenous genes encoding a glycerol 3-phosphatase (GPP). Saccharomyces cerevisiae has two glycerol-3-phosphate phosphatase paralogs encoding GPP1 (UniProt No. P41277; SEQ ID NO: 257) and GPP2 (UniProt No. P40106; SEQ ID NO: 258) (Pahlman et al. (2001) J. Biol. Chem. 276(5):3555-63; Norbeck et al. (1996) J. Biol. Chem. 271(23):13875-81). In some embodiments, the host cell or fermenting organism comprises a disruption to GPP1. In some embodiments, the host cell or fermenting organism comprises a disruption to GPP2. In some embodiments, the host cell or fermenting organism comprises a disruption to GPP1 and GPP2.

[0605] In some embodiments, the host cell or fermenting organism comprises a disruption to one or more endogenous genes encoding a glycerol 3-phosphate dehydrogenase (GPD). Saccharomyces cerevisiae has two glycerol 3-phosphate dehydrogenases which encode GPD1 (UniProt No. Q00055; SEQ ID NO: 259) and GPD2 (UniProt No. P41911; SEQ ID NO: 260). In some embodiments, the host cell or fermenting organism comprises a disruption to GPD1. In some embodiments, the host cell or fermenting organism comprises a disruption to GPD2. In some embodiments, the host cell or fermenting organism comprises a disruption to GPD1 and GPD2.

[0606] In some embodiments, the host cell or fermenting organism comprises a disruption to an endogenous gene encoding GPP (e.g., GPP1 and/or GPP2) and/or a GPD (GPD1 and/or GPD2), wherein the host cell or fermenting organism produces a decreased amount of glycerol (e.g., at least 25% less, at least 50% less, at least 60% less, at least 70% less, at least 80% less, or at least 90% less) compared to the cell without the disruption to the endogenous gene encoding the GPP and/or GPD when cultivated under identical conditions.

[0607] Modeling analysis can be used to design gene disruptions that additionally optimize utilization of the pathway. One exemplary computational method for identifying and designing metabolic alterations favoring biosynthesis of a desired product is the OptKnock computational framework, Burgard et al., 2003, Biotechnol. Bioeng. 84: 647-657.

[0608] The host cells and fermenting organisms comprising a gene disruption may be constructed using methods well known in the art, including those methods described herein. A portion of the gene can be disrupted such as the coding region or a control sequence required for expression of the coding region. Such a control sequence of the gene may be a promoter sequence or a functional part thereof, i.e., a part that is sufficient for affecting expression of the gene. For example, a promoter sequence may be inactivated resulting in no expression or a weaker promoter may be substituted for the native promoter sequence to reduce expression of the coding sequence. Other control sequences for possible modification include, but are not limited to, a leader, propeptide sequence, signal sequence, transcription terminator, and transcriptional activator.

[0609] The host cells and fermenting organisms comprising a gene disruption may be constructed by gene deletion techniques to eliminate or reduce expression of the gene. Gene deletion techniques enable the partial or complete removal of the gene thereby eliminating their expression. In such methods, deletion of the gene is accomplished by homologous recombination using a plasmid that has been constructed to contiguously contain the 5′ and 3′ regions flanking the gene.

[0610] The host cells and fermenting organisms comprising a gene disruption may also be constructed by introducing, substituting, and/or removing one or more (e.g., two, several) nucleotides in the gene or a control sequence thereof required for the transcription or translation thereof. For example, nucleotides may be inserted or removed for the introduction of a stop codon, the removal of the start codon, or a frame-shift of the open reading frame. Such a modification may be accomplished by site-directed mutagenesis or PCR generated mutagenesis in accordance with methods known in the art. See, for example, Botstein and Shortle, 1985, Science 229: 4719; Lo et al., 1985, Proc. Natl. Acad. Sci. U.S.A. 81: 2285; Higuchi et al., 1988, Nucleic Acids Res 16: 7351; Shimada, 1996, Meth. Mol. Biol. 57:157; Ho et al., 1989, Gene 77: 61; Horton et al., 1989, Gene 77: 61; and Sarkar and Sommer, 1990, BioTechniques 8: 404.

[0611] The host cells and fermenting organisms comprising a gene disruption may also be constructed by inserting into the gene a disruptive nucleic acid construct comprising a nucleic acid fragment homologous to the gene that will create a duplication of the region of homology and incorporate construct DNA between the duplicated regions. Such a gene disruption can eliminate gene expression if the inserted construct separates the promoter of the gene from the coding region or interrupts the coding sequence such that a non-functional gene product results. A disrupting construct may be simply a selectable marker gene accompanied by 5′ and 3′ regions homologous to the gene. The selectable marker enables identification of transformants containing the disrupted gene.

[0612] The host cells and fermenting organisms comprising a gene disruption may also be constructed by the process of gene conversion (see, for example, Iglesias and Trautner, 1983, Molecular General Genetics 189: 73-76). For example, in the gene conversion method, a nucleotide sequence corresponding to the gene is mutagenized in vitro to produce a defective nucleotide sequence, which is then transformed into the recombinant strain to produce a defective gene. By homologous recombination, the defective nucleotide sequence replaces the endogenous gene. It may be desirable that the defective nucleotide sequence also comprises a marker for selection of transformants containing the defective gene.

[0613] The host cells and fermenting organisms comprising a gene disruption may be further constructed by random or specific mutagenesis using methods well known in the art, including, but not limited to, chemical mutagenesis (see, for example, Hopwood, The Isolation of Mutants in Methods in Microbiology (J. R. Norris and D. W. Ribbons, eds.) pp. 363-433, Academic Press, New York, 1970). Modification of the gene may be performed by subjecting the parent strain to mutagenesis and screening for mutant strains in which expression of the gene has been reduced or inactivated. The mutagenesis, which may be specific or random, may be performed, for example, by use of a suitable physical or chemical mutagenizing agent, use of a suitable oligonucleotide, or subjecting the DNA sequence to PCR generated mutagenesis. Furthermore, the mutagenesis may be performed by use of any combination of these mutagenizing methods.

[0614] Examples of a physical or chemical mutagenizing agent suitable for the present purpose include ultraviolet (UV) irradiation, hydroxylamine, N-methyl-N′-nitro-N-nitrosoguanidine (MNNG), N-methyl-N′-nitrosogaunidine (NTG) O-methyl hydroxylamine, nitrous acid, ethyl methane sulphonate (EMS), sodium bisulphite, formic acid, and nucleotide analogues. Men such agents are used, the mutagenesis is typically performed by incubating the parent strain to be mutagenized in the presence of the mutagenizing agent of choice under suitable conditions, and selecting for mutants exhibiting reduced or no expression of the gene.

[0615] A nucleotide sequence homologous or complementary to a gene described herein may be used from other microbial sources to disrupt the corresponding gene in a recombinant strain of choice.

[0616] In one embodiment, the modification of a gene in the recombinant cell is unmarked with a selectable marker. Removal of the selectable marker gene may be accomplished by culturing the mutants on a counter-selection medium. Where the selectable marker gene contains repeats flanking its 5′ and 3′ ends, the repeats will facilitate the looping out of the selectable marker gene by homologous recombination when the mutant strain is submitted to counter-selection. The selectable marker gene may also be removed by homologous recombination by introducing into the mutant strain a nucleic acid fragment comprising 5′ and 3′ regions of the defective gene, but lacking the selectable marker gene, followed by selecting on the counter-selection medium. By homologous recombination, the defective gene containing the selectable marker gene is replaced with the nucleic acid fragment lacking the selectable marker gene. Other methods known in the art may also be used.

### Methods Using a Starch-Containing Material

[0617] In some embodiments, the methods described herein produce a fermentation product from a starch-containing material. Starch-containing material is well-known in the art, containing two types of homopolysaccharides (amylose and amylopectin) and is linked by alpha-(1-4)-D-glycosidic bonds. Any suitable starch-containing starting material may be used. The starting material is generally selected based on the desired fermentation product, such as ethanol. Examples of starch-containing starting materials include cereal, tubers or grains. Specifically, the starch-containing material may be corn, wheat, barley, rye, milo, sago, cassava, tapioca, sorghum, oat, rice, peas, beans, or sweet potatoes, or mixtures thereof. Contemplated are also waxy and non-waxy types of corn and barley.

[0618] In one embodiment, the starch-containing starting material is corn. In one embodiment, the starch-containing starting material is wheat. In one embodiment, the starch-containing starting material is barley. In one embodiment, the starch-containing starting material is rye. In one embodiment, the starch-containing starting material is milo. In one embodiment, the starch-containing starting material is sago. In one embodiment, the starch-containing starting material is cassava. In one embodiment, the starch-containing starting material is tapioca. In one embodiment, the starch-containing starting material is sorghum. In one embodiment, the starch-containing starting material is rice. In one embodiment, the starch-containing starting material is peas. In one embodiment, the starch-containing starting material is beans. In one embodiment, the starch-containing starting material is sweet potatoes. In one embodiment, the starch-containing starting material is oats.

[0619] The methods using a starch-containing material may include a conventional process (e.g., including a liquefaction step described in more detail below) or a raw starch hydrolysis process. In some embodiments using a starch-containing material, saccharification of the starch-containing material is at a temperature above the initial gelatinization temperature. In some embodiments using a starch-containing material, saccharification of the starch-containing material is at a temperature below the initial gelatinization temperature.

### Liquefaction

[0620] In embodiments using a starch-containing material, the methods may further comprise a liquefaction step carried out by subjecting the starch-containing material at a temperature above the initial gelatinization temperature to an alpha-amylase and optionally a protease and/or a glucoamylase. Other enzymes such as a pullulanase and phytase may also be present and/or added in liquefaction. In some embodiments, the liquefaction step is carried out prior to steps a) and b) of the described methods.

[0621] Liquefaction step may be carried out for 0.5-5 hours, such as 1-3 hours, such as typically about 2 hours.

[0622] The term “initial gelatinization temperature” means the lowest temperature at which gelatinization of the starch-containing material commences. In general, starch heated in water begins to gelatinize between about 50° C. and 75° C.; the exact temperature of gelatinization depends on the specific starch and can readily be determined by the skilled artisan. Thus, the initial gelatinization temperature may vary according to the plant species, to the particular variety of the plant species as well as with the growth conditions. The initial gelatinization temperature of a given starch-containing material may be determined as the temperature at which birefringence is lost in 5% of the starch granules using the method described by Gorinstein and Lii, 1992, Starch/Starke 44(12): 461-466.

[0623] Liquefaction is typically carried out at a temperature in the range from 70-100° C. In one embodiment, the temperature in liquefaction is between 75-95° C., such as between 75-90° C., between 80-90° C., or between 82-88° C., such as about 85° C.

[0624] A jet-cooking step may be carried out prior to liquefaction in step, for example, at a temperature between 110-145° C., 120-140° C., 125-135° C., or about 130° C. for about 1-15 minutes, for about 3-10 minutes, or about 5 minutes.

[0625] The pH during liquefaction may be between 4 and 7, such as pH 4.5-6.5, pH 5.0-6.5, pH 5.0-6.0, pH 5.2-6.2, or about 5.2, about 5.4, about 5.6, or about 5.8.

[0626] In one embodiment, the process further comprises, prior to liquefaction, the steps of:

[0627] i) reducing the particle size of the starch-containing material, preferably by dry milling;

[0628] ii) forming a slurry comprising the starch-containing material and water.

[0629] The starch-containing starting material, such as whole grains, may be reduced in particle size, e.g., by milling, in order to open up the structure, to increase surface area, and allowing for further processing. Generally, there are two types of processes: wet and dry milling. In dry milling whole kernels are milled and used. Wet milling gives a good separation of germ and meal (starch granules and protein). Wet milling is often applied at locations where the starch hydrolysate is used in production of, e.g., syrups. Both dry milling and wet milling are well known in the art of starch processing. In one embodiment the starch-containing material is subjected to dry milling. In one embodiment, the particle size is reduced to between 0.05 to 3.0 mm, e.g., 0.1-0.5 mm, or so that at least 30%, at least 50%, at least 70%, or at least 90% of the starch-containing material fit through a sieve with a 0.05 to 3.0 mm screen, e.g., 0.1-0.5 mm screen. In another embodiment, at least 50%, e.g., at least 70%, at least 80%, or at least 90% of the starch-containing material fit through a sieve with #6 screen.

[0630] The aqueous slurry may contain from 10-55 w/w-% dry solids (DS), e.g., 25-45 w/w-% dry solids (DS), or 30-40 w/w-% dry solids (DS) of starch-containing material.

[0631] The alpha-amylase, optionally a protease, and optionally a glucoamylase may initially be added to the aqueous slurry to initiate liquefaction (thinning). In one embodiment, only a portion of the enzymes (e.g., about ⅓) is added to the aqueous slurry, while the rest of the enzymes (e.g., about ⅔) are added during liquefaction step.

[0632] A non-exhaustive list of alpha-amylases used in liquefaction can be found in the “Alpha-Amylases” section. Examples of suitable proteases used in liquefaction include any protease described supra in the “Proteases” section. Examples of suitable glucoamylases used in liquefaction include any glucoamylase found in the “Glucoamylases” section.

### Saccharification and Fermentation of Starch-Containing Material

[0633] In embodiments using a starch-containing material, a glucoamylase may be present and/or added in saccharification step a) and/or fermentation step b) or simultaneous saccharification and fermentation (SSF). The glucoamylase of the saccharification step a) and/or fermentation step b) or simultaneous saccharification and fermentation (SSF) is typically different from the glucoamylase optionally added to any liquefaction step described supra. In one embodiment, the glucoamylase is present and/or added together with a fungal alpha-amylase.

[0634] In some embodiments, the host cell or fermenting organism comprises a heterologous polynucleotide encoding a glucoamylase, for example, as described in WO2017/087330, the content of which is hereby incorporated by reference.

[0635] Examples of glucoamylases can be found in the “Glucoamylases” section.

[0636] When doing sequential saccharification and fermentation, saccharification step a) may be carried out under conditions well-known in the art. For instance, saccharification step a) may last up to from about 24 to about 72 hours. In one embodiment, pre-saccharification is done. Pre-saccharification is typically done for 40-90 minutes at a temperature between 30-65° C., typically about 60° C. Pre-saccharification is, in one embodiment, followed by saccharification during fermentation in simultaneous saccharification and fermentation (SSF). Saccharification is typically carried out at temperatures from 20-75° C., preferably from 40-70° C., typically about 60° C., and typically at a pH between 4 and 5, such as about pH 4.5.

[0637] Fermentation is carried out in a fermentation medium, as known in the art and, e.g., as described herein. The fermentation medium includes the fermentation substrate, that is, the carbohydrate source that is metabolized by the fermenting organism. With the processes described herein, the fermentation medium may comprise nutrients and growth stimulator(s) for the fermenting organism(s). Nutrient and growth stimulators are widely used in the art of fermentation and include nitrogen sources, such as ammonia; urea, vitamins and minerals, or combinations thereof.

[0638] Generally, fermenting organisms such as yeast, including Saccharomyces cerevisiae yeast, require an adequate source of nitrogen for propagation and fermentation. Many sources of supplemental nitrogen, if necessary, can be used and such sources of nitrogen are well known in the art. The nitrogen source may be organic, such as urea, DDGs, wet cake or corn mash, or inorganic, such as ammonia or ammonium hydroxide. In one embodiment, the nitrogen source is urea.

[0639] Fermentation can be carried out under low nitrogen conditions, e.g., when using a protease-expressing yeast. In some embodiments, the fermentation step is conducted with less than 1000 ppm supplemental nitrogen (e.g., urea or ammonium hydroxide), such as less than 750 ppm, less than 500 ppm, less than 400 ppm, less than 300 ppm, less than 250 ppm, less than 200 ppm, less than 150 ppm, less than 100 ppm, less than 75 ppm, less than 50 ppm, less than 25 ppm, or less than 10 ppm, supplemental nitrogen. In some embodiments, the fermentation step is conducted with no supplemental nitrogen.

[0640] Simultaneous saccharification and fermentation (“SSF”) is widely used in industrial scale fermentation product production processes, especially ethanol production processes. When doing SSF the saccharification step a) and the fermentation step b) are carried out simultaneously. There is no holding stage for the saccharification, meaning that a fermenting organism, such as yeast, and enzyme(s), may be added together. However, it is also contemplated to add the fermenting organism and enzyme(s) separately. SSF is typically carried out at a temperature from 25° C. to 40° C., such as from 28° C. to 35° C., such as from 30° C. to 34° C., or about 32° C. In one embodiment, fermentation is ongoing for 6 to 120 hours, in particular 24 to 96 hours. In one embodiment, the pH is between 4-5.

[0641] In one embodiment, a cellulolytic enzyme composition is present and/or added in saccharification, fermentation or simultaneous saccharification and fermentation (SSF). Examples of such cellulolytic enzyme compositions can be found in the “Cellulolytic Enzymes and Compositions” section. The cellulolytic enzyme composition may be present and/or added together with a glucoamylase, such as one disclosed in the “Glucoamylases” section.

### Methods Using a Cellulosic-Containing Material

[0642] In some embodiments, the methods described herein produce a fermentation product from a cellulosic-containing material. The predominant polysaccharide in the primary cell wall of biomass is cellulose, the second most abundant is hemicellulose, and the third is pectin. The secondary cell wall, produced after the cell has stopped growing, also contains polysaccharides and is strengthened by polymeric lignin covalently cross-linked to hemicellulose. Cellulose is a homopolymer of anhydrocellobiose and thus a linear beta-(1-4)-D-glucan, while hemicelluloses include a variety of compounds, such as xylans, xyloglucans, arabinoxylans, and mannans in complex branched structures with a spectrum of substituents. Although generally polymorphous, cellulose is found in plant tissue primarily as an insoluble crystalline matrix of parallel glucan chains. Hemicelluloses usually hydrogen bond to cellulose, as well as to other hemicelluloses, which help stabilize the cell wall matrix.

[0643] Cellulose is generally found, for example, in the stems, leaves, hulls, husks, and cobs of plants or leaves, branches, and wood of trees. The cellulosic-containing material can be, but is not limited to, agricultural residue, herbaceous material (including energy crops), municipal solid waste, pulp and paper mill residue, waste paper, and wood (including forestry residue) (see, for example, Wiselogel et al., 1995, in Handbook on Bioethanol (Charles E. Wyman, editor), pp. 105-118, Taylor & Francis, Washington D.C.; Wyman, 1994, Bioresource Technology 50: 3-16; Lynd, 1990, Applied Biochemistry and Biotechnology 24/25: 695-719; Mosier et al., 1999, Recent Progress in Bioconversion of Lignocellulosics, in Advances in Biochemical Engineering/Biotechnology, T. Scheper, managing editor, Volume 65, pp. 23-40, Springer-Verlag, New York). It is understood herein that the cellulose may be in the form of lignocellulose, a plant cell wall material containing lignin, cellulose, and hemicellulose in a mixed matrix. In one embodiment, the cellulosic-containing material is any biomass material. In another embodiment, the cellulosic-containing material is lignocellulose, which comprises cellulose, hemicelluloses, and lignin.

[0644] In one embodiment, the cellulosic-containing material is agricultural residue, herbaceous material (including energy crops), municipal solid waste, pulp and paper mill residue, waste paper, or wood (including forestry residue).

[0645] In another embodiment, the cellulosic-containing material is arundo, bagasse, bamboo, corn cob, corn fiber, corn stover, miscanthus, rice straw, switchgrass, or wheat straw.

[0646] In another embodiment, the cellulosic-containing material is aspen, eucalyptus, fir, pine, poplar, spruce, or willow.

[0647] In another embodiment, the cellulosic-containing material is algal cellulose, bacterial cellulose, cotton linter, filter paper, microcrystalline cellulose (e.g., AVICEL®), or phosphoric-acid treated cellulose.

[0648] In another embodiment, the cellulosic-containing material is an aquatic biomass. As used herein the term “aquatic biomass” means biomass produced in an aquatic environment by a photosynthesis process. The aquatic biomass can be algae, emergent plants, floating-leaf plants, or submerged plants.

[0649] The cellulosic-containing material may be used as is or may be subjected to pretreatment, using conventional methods known in the art, as described herein. In a preferred embodiment, the cellulosic-containing material is pretreated.

[0650] The methods of using cellulosic-containing material can be accomplished using methods conventional in the art. Moreover, the methods of can be implemented using any conventional biomass processing apparatus configured to carry out the processes.

### Cellulosic Pretreatment

[0651] In one embodiment the cellulosic-containing material is pretreated before saccharification.

[0652] In practicing the processes described herein, any pretreatment process known in the art can be used to disrupt plant cell wall components of the cellulosic-containing material (Chandra et al., 2007, Adv. Biochem. Engin./Biotechnol. 108: 67-93; Galbe and Zacchi, 2007, Adv. Biochem. Engin./Biotechnol. 108: 41-65; Hendriks and Zeeman, 2009, Bioresource Technology 100: 10-18; Mosier et al., 2005, Bioresource Technology 96: 673-686; Taherzadeh and Karimi, 2008, Int. J. Mol. Sci. 9:1621-1651; Yang and Wyman, 2008, Biofuels Bioproducts and Biorefning-Biofpr. 2: 26-40).

[0653] The cellulosic-containing material can also be subjected to particle size reduction, sieving, pre-soaking, wetting, washing, and/or conditioning prior to pretreatment using methods known in the art.

[0654] Conventional pretreatments include, but are not limited to, steam pretreatment (with or without explosion), dilute acid pretreatment, hot water pretreatment, alkaline pretreatment, lime pretreatment, wet oxidation, wet explosion, ammonia fiber explosion, organosolv pretreatment, and biological pretreatment. Additional pretreatments include ammonia percolation, ultrasound, electroporation, microwave, supercritical CO₂, supercritical H₂O, ozone, ionic liquid, and gamma irradiation pretreatments.

[0655] In a one embodiment, the cellulosic-containing material is pretreated before saccharification (i.e., hydrolysis) and/or fermentation. Pretreatment is preferably performed prior to the hydrolysis. Alternatively, the pretreatment can be carried out simultaneously with enzyme hydrolysis to release fermentable sugars, such as glucose, xylose, and/or cellobiose. In most cases the pretreatment step itself results in some conversion of biomass to fermentable sugars (even in absence of enzymes).

[0656] In one embodiment, the cellulosic-containing material is pretreated with steam. In steam pretreatment, the cellulosic-containing material is heated to disrupt the plant cell wall components, including lignin, hemicellulose, and cellulose to make the cellulose and other fractions, e.g., hemicellulose, accessible to enzymes. The cellulosic-containing material is passed to or through a reaction vessel where steam is injected to increase the temperature to the required temperature and pressure and is retained therein for the desired reaction time. Steam pretreatment is preferably performed at 140-250° C., e.g., 160-200° C. or 170-190° C., where the optimal temperature range depends on optional addition of a chemical catalyst. Residence time for the steam pretreatment is preferably 1-60 minutes, e.g., 1-30 minutes, 1-20 minutes, 3-12 minutes, or 4-10 minutes, where the optimal residence time depends on the temperature and optional addition of a chemical catalyst. Steam pretreatment allows for relatively high solids loadings, so that the cellulosic-containing material is generally only moist during the pretreatment. The steam pretreatment is often combined with an explosive discharge of the material after the pretreatment, which is known as steam explosion, that is, rapid flashing to atmospheric pressure and turbulent flow of the material to increase the accessible surface area by fragmentation (Duff and Murray, 1996, Bioresource Technology 855: 1-33; Galbe and Zacchi, 2002, Appl. Microbiol. Biotechnol. 59: 618-628; U.S. Patent Application No. 2002/0164730). During steam pretreatment, hemicellulose acetyl groups are cleaved and the resulting acid autocatalyzes partial hydrolysis of the hemicellulose to monosaccharides and oligosaccharides. Lignin is removed to only a limited extent.

[0657] In one embodiment, the cellulosic-containing material is subjected to a chemical pretreatment. The term “chemical treatment” refers to any chemical pretreatment that promotes the separation and/or release of cellulose, hemicellulose, and/or lignin. Such a pretreatment can convert crystalline cellulose to amorphous cellulose. Examples of suitable chemical pretreatment processes include, for example, dilute acid pretreatment, lime pretreatment, wet oxidation, ammonia fiber/freeze expansion (AFEX), ammonia percolation (APR), ionic liquid, and organosolv pretreatments.

[0658] A chemical catalyst such as H₂SO₄ or SO₂ (typically 0.3 to 5% w/w) is sometimes added prior to steam pretreatment, which decreases the time and temperature, increases the recovery, and improves enzymatic hydrolysis (Ballesteros et al., 2006, Appl. Biochem. Biotechnol. 129-132: 496-508; Varga et al., 2004, Appl. Biochem. Biotechnol. 113-116: 509-523; Sassner et al., 2006, Enzyme Microb. Technol. 39: 756-762). In dilute acid pretreatment, the cellulosic-containing material is mixed with dilute acid, typically H₂SO₄, and water to form a slurry, heated by steam to the desired temperature, and after a residence time flashed to atmospheric pressure. The dilute acid pretreatment can be performed with a number of reactor designs, e.g., plug-flow reactors, counter-current reactors, or continuous counter-current shrinking bed reactors (Duff and Murray, 1996, Bioresource Technology 855: 1-33; Schell et al., 2004, Bioresource Technology 91: 179-188; Lee et al., 1999, Adv. Biochem. Eng. Biotechnol. 65: 93-115). In a specific embodiment the dilute acid pretreatment of cellulosic-containing material is carried out using 4% w/w sulfuric acid at 180° C. for 5 minutes.

[0659] Several methods of pretreatment under alkaline conditions can also be used. These alkaline pretreatments include, but are not limited to, sodium hydroxide, lime, wet oxidation, ammonia percolation (APR), and ammonia fiber/freeze expansion (AFEX) pretreatment. Lime pretreatment is performed with calcium oxide or calcium hydroxide at temperatures of 85-150° C. and residence times from 1 hour to several days (Wyman et al., 2005, Bioresource Technology 96: 1959-1966; Mosier et al., 2005, Bioresource Technology 96: 673486). WO2006/110891, WO2006/110899, WO2006/110900, and WO02006/110901 disclose pretreatment methods using ammonia.

[0660] Wet oxidation is a thermal pretreatment performed typically at 180-200° C. for 5-15 minutes with addition of an oxidative agent such as hydrogen peroxide or over-pressure of oxygen (Schmidt and Thomsen, 1998, Bioresource Technology 64: 139-151; Palonen et al., 2004, Appl. Biochem. Biotechnol. 117: 1-17; Varga et al., 2004, Biotechnol. Bioeng. 88: 567-574; Martin et al., 2006, J. Chem. Technol. Biotechnol. 81: 1669-1677). The pretreatment is performed preferably at 1-40% dry matter, e.g., 2-30% dry matter or 5-20% dry matter, and often the initial pH is increased by the addition of alkali such as sodium carbonate.

[0661] A modification of the wet oxidation pretreatment method, known as wet explosion (combination of wet oxidation and steam explosion) can handle dry matter up to 30%. In wet explosion, the oxidizing agent is introduced during pretreatment after a certain residence time. The pretreatment is then ended by flashing to atmospheric pressure (WO 2006/032282).

[0662] Ammonia fiber expansion (AFEX) involves treating the cellulosic-containing material with liquid or gaseous ammonia at moderate temperatures such as 90-150° C. and high pressure such as 17-20 bar for 5-10 minutes, where the dry matter content can be as high as 60% (Gollapalli et al., 2002, Appl. Biochem. Biotechnol. 98: 23-35; Chundawat et al., 2007, Biotechnol. Bioeng. 96: 219-231; Alizadeh et al., 2005, Appl. Biochem. Biotechnol. 121: 1133-1141; Teymouri et al., 2005, Bioresource Technology 96: 2014-2018). During AFEX pretreatment cellulose and hemicelluloses remain relatively intact. Lignin-carbohydrate complexes are cleaved.

[0663] Organosolv pretreatment delignifies the cellulosic-containing material by extraction using aqueous ethanol (40-60% ethanol) at 160-200° C. for 30-60 minutes (Pan et al., 2005, Biotechnol. Bioeng. 90: 473-481; Pan et al., 2006, Biotechnol. Bioeng. 94: 851-861; Kurabi et al., 2005, Appl. Biochem. Biotechnol. 121: 219-230). Sulphuric acid is usually added as a catalyst. In organosolv pretreatment, the majority of hemicellulose and lignin is removed.

[0664] Other examples of suitable pretreatment methods are described by Schell et al., 2003, Appl. Biochem. Biotechnol. 105-108: 69-85, and Mosier et al., 2005, Bioresource Technology 96: 673-686, and U.S. Published Application 2002/0164730.

[0665] In one embodiment, the chemical pretreatment is carried out as a dilute acid treatment, and more preferably as a continuous dilute acid treatment. The acid is typically sulfuric acid, but other acids can also be used, such as acetic acid, citric acid, nitric acid, phosphoric acid, tartaric acid, succinic acid, hydrogen chloride, or mixtures thereof. Mild acid treatment is conducted in the pH range of preferably 1-5, e.g., 1-4 or 1-2.5. In one embodiment, the acid concentration is in the range from preferably 0.01 to 10 wt. % acid, e.g., 0.05 to 5 wt. % acid or 0.1 to 2 wt. % acid. The acid is contacted with the cellulosic-containing material and held at a temperature in the range of preferably 140-200° C., e.g., 165-190° C., for periods ranging from 1 to 60 minutes.

[0666] In another embodiment, pretreatment takes place in an aqueous slurry. In preferred embodiments, the cellulosic-containing material is present during pretreatment in amounts preferably between 10-80 wt. %, e.g., 20-70 wt. % or 30-60 wt. %, such as around 40 wt. %. The pretreated cellulosic-containing material can be unwashed or washed using any method known in the art, e.g., washed with water.

[0667] In one embodiment, the cellulosic-containing material is subjected to mechanical or physical pretreatment. The term “mechanical pretreatment” or “physical pretreatment” refers to any pretreatment that promotes size reduction of particles. For example, such pretreatment can involve various types of grinding or milling (e.g., dry milling, wet milling, or vibratory ball milling).

[0668] The cellulosic-containing material can be pretreated both physically (mechanically) and chemically. Mechanical or physical pretreatment can be coupled with steaming/steam explosion, hydrothermolysis, dilute or mild acid treatment, high temperature, high pressure treatment, irradiation (e.g., microwave irradiation), or combinations thereof. In one embodiment, high pressure means pressure in the range of preferably about 100 to about 400 psi, e.g., about 150 to about 250 psi. In another embodiment, high temperature means temperature in the range of about 100 to about 300° C., e.g., about 140 to about 200° C. In a preferred embodiment, mechanical or physical pretreatment is performed in a batch-process using a steam gun hydrolyzer system that uses high pressure and high temperature as defined above, e.g., a Sunds Hydrolyzer available from Sunds Defibrator AB, Sweden. The physical and chemical pretreatments can be carried out sequentially or simultaneously, as desired.

[0669] Accordingly, in one embodiment, the cellulosic-containing material is subjected to physical (mechanical) or chemical pretreatment, or any combination thereof, to promote the separation and/or release of cellulose, hemicellulose, and/or lignin.

[0670] In one embodiment, the cellulosic-containing material is subjected to a biological pretreatment. The term “biological pretreatment” refers to any biological pretreatment that promotes the separation and/or release of cellulose, hemicellulose, and/or lignin from the cellulosic-containing material. Biological pretreatment techniques can involve applying lignin-solubilizing microorganisms and/or enzymes (see, for example, Hsu, T.-A., 1996, Pretreatment of biomass, in Handbook on Bioethanol: Production and Utilization, Wyman, C. E., ed., Taylor & Francis, Washington, D.C., 179-212; Ghosh and Singh, 1993, Adv. Appl. Microbiol. 39: 295-333; McMillan, J. D., 1994, Pretreating lignocellulosic biomass: a review, in Enzymatic Conversion of Biomass for Fuels Production, Himmel, M. E., Baker, J. O., and Overend, R. P., eds., ACS Symposium Series 566, American Chemical Society, Washington, D.C., chapter 15; Gong, C. S., Cao, N. J., Du, J., and Tsao, G. T., 1999, Ethanol production from renewable resources, in Advances in Biochemical Engineering/Biotechnology, Scheper, T., ed., Springer-Verlag Berlin Heidelberg, Germany, 65: 207-241; Olsson and Hahn-Hagerdal, 1996, Enz. Microb. Tech. 18: 312-331; and Vallander and Eriksson, 1990, Adv. Biochem. Eng./Biotechnol. 42: 63-95).

### Saccharification and Fermentation of Cellulosic-Containing Material

[0671] Saccharification (i.e., hydrolysis) and fermentation, separate or simultaneous, include, but are not limited to, separate hydrolysis and fermentation (SHF); simultaneous saccharification and fermentation (SSF); simultaneous saccharification and co-fermentation (SSCF); hybrid hydrolysis and fermentation (HHF); separate hydrolysis and co-fermentation (SHCF); hybrid hydrolysis and co-fermentation (HHCF).

[0672] SHF uses separate process steps to first enzymatically hydrolyze the cellulosic-containing material to fermentable sugars, e.g., glucose, cellobiose, and pentose monomers, and then ferment the fermentable sugars to ethanol. In SSF, the enzymatic hydrolysis of the cellulosic-containing material and the fermentation of sugars to ethanol are combined in one step (Philippidis, G. P., 1996, Cellulose bioconversion technology, in Handbook on Bioethanol: Production and Utilization, Wyman, C. E., ed., Taylor & Francis, Washington, D.C., 179-212). SSCF involves the co-fermentation of multiple sugars (Sheehan and Himmel, 1999, Biotechnol. Prog. 15: 817-827). HHF involves a separate hydrolysis step, and in addition a simultaneous saccharification and hydrolysis step, which can be carried out in the same reactor. The steps in an HHF process can be carried out at different temperatures, i.e., high temperature enzymatic saccharification followed by SSF at a lower temperature that the fermentation organismcan tolerate. It is understood herein that any method known in the art comprising pretreatment, enzymatic hydrolysis (saccharification), fermentation, or a combination thereof, can be used in the practicing the processes described herein.

[0673] A conventional apparatus can include a fed-batch stirred reactor, a batch stirred reactor, a continuous flow stirred reactor with ultrafiltration, and/or a continuous plug-flow column reactor (de Castilhos Corazza et al., 2003, Acta Scientiarum. Technology 25: 33-38; Gusakov and Sinitsyn, 1985, Enz. Microb. Technol. 7: 346-352), an attrition reactor (Ryu and Lee, 1983, Biotechnol. Bioeng. 25: 53-65). Additional reactor types include fluidized bed, upflow blanket, immobilized, and extruder type reactors for hydrolysis and/or fermentation.

[0674] In the saccharification step (i.e., hydrolysis step), the cellulosic and/or starch-containing material, e.g., pretreated, is hydrolyzed to break down cellulose, hemicellulose, and/or starch to fermentable sugars, such as glucose, cellobiose, xylose, xylulose, arabinose, mannose, galactose, and/or soluble oligosaccharides. The hydrolysis is performed enzymatically e.g., by a cellulolytic enzyme composition. The enzymes of the compositions can be added simultaneously or sequentially.

[0675] Enzymatic hydrolysis may be carried out in a suitable aqueous environment under conditions that can be readily determined by one skilled in the art. In one embodiment, hydrolysis is performed under conditions suitable for the activity of the enzymes(s), i.e., optimal for the enzyme(s). The hydrolysis can be carried out as a fed batch or continuous process where the cellulosic and/or starch-containing material is fed gradually to, for example, an enzyme containing hydrolysis solution.

[0676] The saccharification is generally performed in stirred-tank reactors or fermentors under controlled pH, temperature, and mixing conditions. Suitable process time, temperature and pH conditions can readily be determined by one skilled in the art For example, the saccharification can last up to 200 hours, but is typically performed for preferably about 12 to about 120 hours, e.g., about 16 to about 72 hours or about 24 to about 48 hours. The temperature is in the range of preferably about 25° C. to about 70° C., e.g., about 30° C. to about 65° C., about 40° C. to about 60° C., or about 50° C. to about 55° C. The pH is in the range of preferably about 3 to about 8, e.g., about 3.5 to about 7, about 4 to about 6, or about 4.5 to about 5.5. The dry solids content is in the range of preferably about 5 to about 50 wt. %, e.g., about 10 to about 40 wt. % or about 20 to about 30 wt. %.

[0677] Saccharification in may be carried out using a cellulolytic enzyme composition. Such enzyme compositions are described below in the “Cellulolytic Enzyme Composition’-section below. The cellulolytic enzyme compositions can comprise any protein useful in degrading the cellulosic-containing material. In one embodiment, the cellulolytic enzyme composition comprises or further comprises one or more (e.g., several) proteins selected from the group consisting of a cellulase, an AA9 (GH61) polypeptide, a hemicellulase, an esterase, an expansin, a ligninolytic enzyme, an oxidoreductase, a pectinase, a protease, and a swollenin.

[0678] In another embodiment, the cellulase is preferably one or more (e.g., several) enzymes selected from the group consisting of an endoglucanase, a cellobiohydrolase, and a beta-glucosidase.

[0679] In another embodiment, the hemicellulase is preferably one or more (e.g., several) enzymes selected from the group consisting of an acetylmannan esterase, an acetylxylan esterase, an arabinanase, an arabinofuranosidase, a coumaric acid esterase, a feruloyl esterase, a galactosidase, a glucuronidase, a glucuronoyl esterase, a mannanase, a mannosidase, a xylanase, and a xylosidase. In another embodiment, the oxidoreductase is one or more (e.g., several) enzymes selected from the group consisting of a catalase, a laccase, and a peroxidase.

The enzymes or enzyme compositions used in a processes of the present invention may be in any form suitable for use, such as, for example, a fermentation broth formulation or a cell composition, a cell lysate with or without cellular debris, a semi-purified or purified enzyme preparation, or a host cell as a source of the enzymes. The enzyme composition may be a dry powder or granulate, a non-dusting granulate, a liquid, a stabilized liquid, or a stabilized protected enzyme. Liquid enzyme preparations may, for instance, be stabilized by adding stabilizers such as a sugar, a sugar alcohol or another polyol, and/or lactic acid or another organic acid according to established processes.

[0680] In one embodiment, an effective amount of cellulolytic or hemicellulolytic enzyme composition to the cellulosic-containing material is about 0.5 to about 50 mg, e.g., about 0.5 to about 40 mg, about 0.5 to about 25 mg, about 0.75 to about 20 mg, about 0.75 to about 15 mg, about 0.5 to about 10 mg, or about 2.5 to about 10 mg per g of the cellulosic-containing material.

[0681] In one embodiment, such a compound is added at a molar ratio of the compound to glucosyl units of cellulose of about 10⁻⁶ to about 10, e.g., about 10⁻⁶ to about 7.5, about 10⁻⁶ to about 5, about 10⁻⁶ to about 2.5, about 10⁻⁶ to about 1, about 10⁻⁵ to about 1, about 10⁻⁵ to about 10⁻¹, about 10⁻⁴ to about 10⁻¹, about 10⁻³ to about 10⁻¹, or about 10⁻³ to about 10⁻². In another embodiment, an effective amount of such a compound is about 0.1 μM to about 1 M, e.g., about 0.5 μM to about 0.75 M, about 0.75 μM to about 0.5 M, about 1 μM to about 0.25 M, about 1 μM to about 0.1 M, about 5 μM to about 50 mM, about 10 μM to about 25 mM, about 50 μM to about 25 mM, about 10 μM to about 10 mM, about 5 μM to about 5 mM, or about 0.1 mM to about 1 mM.

[0682] The term “liquor” means the solution phase, either aqueous, organic, or a combination thereof, arising from treatment of a lignocellulose and/or hemicellulose material in a slurry, or monosaccharides thereof, e.g., xylose, arabinose, mannose, etc. under conditions as described in WO2012/021401, and the soluble contents thereof. A liquor for cellulolytic enhancement of an AA9 polypeptide (GH61 polypeptide) can be produced by treating a lignocellulose or hemicellulose material (or feedstock) by applying heat and/or pressure, optionally in the presence of a catalyst, e.g., acid, optionally in the presence of an organic solvent, and optionally in combination with physical disruption of the material, and then separating the solution from the residual solids. Such conditions determine the degree of cellulolytic enhancement obtainable through the combination of liquor and an AA9 polypeptide during hydrolysis of a cellulosic substrate by a cellulolytic enzyme preparation. The liquor can be separated from the treated material using a method standard in the art, such as filtration, sedimentation, or centrifugation.

[0683] In one embodiment, an effective amount of the liquor to cellulose is about 10⁻⁶ to about 10 g per g of cellulose, e.g., about 10⁻⁶ to about 7.5 g, about 10⁻⁶ to about 5 g, about 10⁻⁶ to about 2.5 g, about 10⁻⁶ to about 1 g, about 10⁻⁵ to about 1 g, about 10⁻⁵ to about 10⁻¹ g, about 10⁻⁴ to about 10⁻¹ g, about 10⁻³ to about 10⁻¹ g, or about 10⁻³ to about 10⁻² g per g of cellulose.

[0684] In the fermentation step, sugars, released from the cellulosic-containing material, e.g., as a result of the pretreatment and enzymatic hydrolysis steps, are fermented to ethanol, by a host cell or fermenting organism, such as yeast described herein. Hydrolysis (saccharification) and fermentation can be separate or simultaneous.

[0685] Any suitable hydrolyzed cellulosic-containing material can be used in the fermentation step in practicing the processes described herein. Such feedstocks include, but are not limited to carbohydrates (e.g., lignocellulose, xylans, cellulose, starch, etc.). The material is generally selected based on economics, i.e., costs per equivalent sugar potential, and recalcitrance to enzymatic conversion.

[0686] Production of ethanol by a host cell or fermenting organism using cellulosic-containing material results from the metabolism of sugars (monosaccharides). The sugar composition of the hydrolyzed cellulosic-containing material and the ability of the host cell or fermenting organism to utilize the different sugars has a direct impact in process yields. Prior to Applicant's disclosure herein, strains known in the art utilize glucose efficiently but do not (or very limitedly) metabolize pentoses like xylose, a monosaccharide commonly found in hydrolyzed material.

[0687] Compositions of the fermentation media and fermentation conditions depend on the host cell or fermenting organism and can easily be determined by one skilled in the art. Typically, the fermentation takes place under conditions known to be suitable for generating the fermentation product. In some embodiments, the fermentation process is carried out under aerobic or microaerophilic (i.e., where the concentration of oxygen is less than that in air), or anaerobic conditions. In some embodiments, fermentation is conducted under anaerobic conditions (i.e., no detectable oxygen), or less than about 5, about 2.5, or about 1 mmol/L/h oxygen. In the absence of oxygen, the NADH produced in glycolysis cannot be oxidized by oxidative phosphorylation. Under anaerobic conditions, pyruvate or a derivative thereof may be utilized by the host cell as an electron and hydrogen acceptor in order to generate NAD+.

[0688] The fermentation process is typically run at a temperature that is optimal for the recombinant fungal cell. For example, in some embodiments, the fermentation process is performed at a temperature in the range of from about 25° C. to about 42° C. Typically the process is carried out a temperature that is less than about 38° C., less than about 35° C., less than about 33° C., or less than about 38° C., but at least about 20° C., 22° C., or 25° C.

[0689] A fermentation stimulator can be used in a process described herein to further improve the fermentation, and in particular, the performance of the host cell or fermenting organism, such as, rate enhancement and product yield (e.g., ethanol yield). A “fermentation stimulator” refers to stimulators for growth of the host cells and fermenting organisms, in particular, yeast. Preferred fermentation stimulators for growth include vitamins and minerals. Examples of vitamins include multivitamins, biotin, pantothenate, nicotinic acid, meso-inositol, thiamine, pyridoxine, para-aminobenzoic acid, folic acid, riboflavin, and Vitamins A, B, C, D, and E. See, for example, Alfenore et al., Improving ethanol production and viability of Saccharomyces cerevisiae by a vitamin feeding strategy during fed-batch process, Springer-Verlag (2002), which is hereby incorporated by reference. Examples of minerals include minerals and mineral salts that can supply nutrients comprising P, K, Mg, S, Ca, Fe, Zn, Mn, and Cu.

### Cellulolytic Enzymes and Compositions

[0690] A cellulolytic enzyme or cellulolytic enzyme composition may be present and/or added during saccharification. A cellulolytic enzyme composition is an enzyme preparation containing one or more (e.g., several) enzymes that hydrolyze cellulosic-containing material. Such enzymes include endoglucanase, cellobiohydrolase, beta-glucosidase, and/or combinations thereof.

[0691] In some embodiments, the host cell or fermenting organism comprises one or more (e.g., several) heterologous polynucleotides encoding enzymes that hydrolyze cellulosic-containing material (e.g., an endoglucanase, cellobiohydrolase, beta-glucosidase or combinations thereof). Any enzyme described or referenced herein that hydrolyzes cellulosic-containing material is contemplated for expression in the host cell or fermenting organism.

[0692] The cellulolytic enzyme may be any cellulolytic enzyme that is suitable for the host cells and/or the methods described herein (e.g., an endoglucanase, cellobiohydrolase, beta-glucosidase), such as a naturally occurring cellulolytic enzyme or a variant thereof that retains cellulolytic enzyme activity.

[0693] In some embodiments, the host cell or fermenting organism comprising a heterologous polynucleotide encoding a cellulolytic enzyme has an increased level of cellulolytic enzyme activity (e.g., increased endoglucanase, cellobiohydrolase, and/or beta-glucosidase) compared to the host cells without the heterologous polynucleotide encoding the cellulolytic enzyme, when cultivated under the same conditions. In some embodiments, the host cell or fermenting organism has an increased level of cellulolytic enzyme activity of at least 5%, e.g., at least 10%, at least 15%, at least 20%, at least 25%, at least 50%, at least 100%, at least 150%, at least 200%, at least 300%, or at 500% compared to the host cell or fermenting organism without the heterologous polynucleotide encoding the cellulolytic enzyme, when cultivated under the same conditions.

[0694] Exemplary cellulolytic enzymes that can be used with the host cells and/or the methods described herein include bacterial, yeast, or filamentous fungal cellulolytic enzymes, e.g., obtained from any of the microorganisms described or referenced herein, as described supra under the sections related to proteases.

[0695] The cellulolytic enzyme may be of any origin. In an embodiment the cellulolytic enzyme is derived from a strain of Trichoderma, such as a strain of Trichoderma reesei; a strain of Humicola, such as a strain of Humicola insolens, and/or a strain of Chrysosporium, such as a strain of Chrysosporium lucknowense. In a preferred embodiment the cellulolytic enzyme is derived from a strain of Trichoderma reesei.

[0696] The cellulolytic enzyme composition may further comprise one or more of the following polypeptides, such as enzymes: AA9 polypeptide (GH61 polypeptide) having cellulolytic enhancing activity, beta-glucosidase, xylanase, beta-xylosidase, CBH 1, CBH 11, or a mixture of two, three, four, five or six thereof.

[0697] The further polypeptide(s) (e.g., AA9 polypeptide) and/or enzyme(s) (e.g., beta-glucosidase, xylanase, beta-xylosidase, CBH I and/or CBH 11 may be foreign to the cellulolytic enzyme composition producing organism (e.g., Trichoderma reesei).

[0698] In an embodiment the cellulolytic enzyme composition comprises an AA9 polypeptide having cellulolytic enhancing activity and a beta-glucosidase.

[0699] In another embodiment the cellulolytic enzyme composition comprises an AA9 polypeptide having cellulolytic enhancing activity, a beta-glucosidase, and a CBH 1.

[0700] In another embodiment the cellulolytic enzyme composition comprises an AA9 polypeptide having cellulolytic enhancing activity, a beta-glucosidase, a CBH I and a CBH 11. Other enzymes, such as endoglucanases, may also be comprised in the cellulolytic enzyme composition.

[0701] As mentioned above the cellulolytic enzyme composition may comprise a number of difference polypeptides, including enzymes.

[0702] In one embodiment, the cellulolytic enzyme composition is a Trichoderma reesei cellulolytic enzyme composition, further comprising Thermoascus aurantiacus AA9 (GH61A) polypeptide having cellulolytic enhancing activity (e.g., WO2005/074656), and Aspergillus oryzae beta-glucosidase fusion protein (e.g., one disclosed in WO2008/057637, in particular shown as SEQ ID NOs: 59 and 60).

[0703] In another embodiment the cellulolytic enzyme composition is a Trichoderma reesei cellulolytic enzyme composition, further comprising Thermoascus aurantiacus AA9 (GH61A) polypeptide having cellulolytic enhancing activity (e.g., SEQ ID NO: 2 in WO2005/074656), and Aspergillus fumigatus beta-glucosidase (e.g., SEQ ID NO: 2 of WO2005/047499).

[0704] In another embodiment the cellulolytic enzyme composition is a Trichoderma reesei cellulolytic enzyme composition, further comprising Penicillium emersonii AA9 (GH61A) polypeptide having cellulolytic enhancing activity, in particular the one disclosed in WO2011/041397, and Aspergillus fumigatus beta-glucosidase (e.g., SEQ ID NO: 2 of WO2005/047499).

[0705] In another embodiment the cellulolytic enzyme composition is a Trichoderma reesei cellulolytic enzyme composition, further comprising Penicillium emersonii AA9 (GH61A) polypeptide having cellulolytic enhancing activity, in particular the one disclosed in WO2011/041397, and Aspergillus fumigatus beta-glucosidase (e.g., SEQ ID NO: 2 of WO2005/047499) or a variant disclosed in WO02012/044915 (hereby incorporated by reference), in particular one comprising one or more such as all of the following substitutions: F100D, S283G, N456E, F512Y.

[0706] In an embodiment the cellulolytic enzyme composition is a Trichoderma reesei cellulolytic composition, further comprising an AA9 (GH61A) polypeptide having cellulolytic enhancing activity, in particular the one derived from a strain of Penicillium emersonii (e.g., SEQ ID NO: 2 in WO2011/041397), Aspergillus fumigatus beta-glucosidase (e.g., SEQ ID NO: 2 in WO2005/047499) variant with one or more, in particular all of the following substitutions: F100D, S283G, N456E, F512Y and disclosed in WO2012/044915; Aspergillus fumigatus Cel7A CBH1, e.g., the one disclosed as SEQ ID NO: 6 in WO2011/057140 and Aspergillus fumigatus CBH II, e.g., the one disclosed as SEQ ID NO: 18 in WO2011/057140.

[0707] In a preferred embodiment the cellulolytic enzyme composition is a Trichoderma reesei, cellulolytic enzyme composition, further comprising a hemicellulase or hemicellulolytic enzyme composition, such as an Aspergillus fumigatus xylanase and Aspergillus fumigatus beta-xylosidase.

[0708] In an embodiment the cellulolytic enzyme composition also comprises a xylanase (e.g., derived from a strain of the genus Aspergillus, in particular Aspergillus aculeatus or Aspergillus fumigatus; or a strain of the genus Talaomyces, in particular Talaromyces leycettanus) and/or a beta-xylosidase (e.g., derived from Aspergillus, in particular Aspergillus fumigatus, or a strain of Talaromyces, in particular Talaromyces emersonii).

[0709] In an embodiment the cellulolytic enzyme composition is a Trichoderma reesei cellulolytic enzyme composition, further comprising Thermoascus aurantiacus AA9 (GH61A) polypeptide having cellulolytic enhancing activity (e.g., WO2005/074656), Aspergillus oryzae beta-glucosidase fusion protein (e.g., one disclosed in WO2008/057637, in particular as SEQ ID NOs: 59 and 60), and Aspergillus aculeatus xylanase (e.g., Xyl II in WO94/21785).

[0710] In another embodiment the cellulolytic enzyme composition comprises a Trichoderma reesei cellulolytic preparation, further comprising Thermoascus aurantiacus GH61A polypeptide having cellulolytic enhancing activity (e.g., SEQ ID NO: 2 in WO2005/074656), Aspergillus fumigatus beta-glucosidase (e.g., SEQ ID NO: 2 of WO2005/047499) and Aspergillus aculeatus xylanase (Xyl II disclosed in WO94/21785).

[0711] In another embodiment the cellulolytic enzyme composition comprises a Trichoderma reesei cellulolytic enzyme composition, further comprising Thermoascus aurantiacus AA9 (GH61A) polypeptide having cellulolytic enhancing activity (e.g., SEQ ID NO: 2 in WO2005/074656), Aspergillus fumigatus beta-glucosidase (e.g., SEQ ID NO: 2 of WO2005/047499) and Aspergillus aculeatus xylanase (e.g., Xyl II disclosed in WO94/21785).

[0712] In another embodiment the cellulolytic enzyme composition is a Trichoderma reesei cellulolytic enzyme composition, further comprising Penicillium emersonii AA9 (GH61A) polypeptide having cellulolytic enhancing activity, in particular the one disclosed in WO2011/041397, Aspergillus fumigatus beta-glucosidase (e.g., SEQ ID NO: 2 of WO2005/047499) and Aspergillus fumigatus xylanase (e.g., Xyl III in WO2006/078256).

[0713] In another embodiment the cellulolytic enzyme composition comprises a Trichoderma reesei cellulolytic enzyme composition, further comprising Penicillium emersonii AA9 (GH61A) polypeptide having cellulolytic enhancing activity, in particular the one disclosed in WO2011/041397, Aspergillus fumigatus beta-glucosidase (e.g., SEQ ID NO: 2 of WO2005/047499), Aspergillus fumigatus xylanase (e.g., XylI III in WO2006/078256), and CBH I from Aspergillus fumigatus, in particular Cel7A CBH1 disclosed as SEQ ID NO: 2 in WO02011/057140.

[0714] In another embodiment the cellulolytic enzyme composition is a Trichoderma reesei cellulolytic enzyme composition, further comprising Penicillium emersonii AA9 (GH61A) polypeptide having cellulolytic enhancing activity, in particular the one disclosed in WO2011/041397, Aspergillus fumigatus beta-glucosidase (e.g., SEQ ID NO: 2 of WO2005/047499), Aspergillus fumigatus xylanase (e.g., Xyl III in WO2006/078256), CBH I from Aspergillus fumigatus, in particular Cel7A CBH1 disclosed as SEQ ID NO: 2 in WO2011/057140, and CBH II derived from Aspergillus fumigatus in particular the one disclosed as SEQ ID NO: 4 in WO2013/028928.

[0715] In another embodiment the cellulolytic enzyme composition is a Trichoderma reesei cellulolytic enzyme composition, further comprising Penicillium emersonii AA9 (GH61A) polypeptide having cellulolytic enhancing activity, in particular the one disclosed in WO2011/041397, Aspergillus fumigatus beta-glucosidase (e.g., SEQ ID NO: 2 of WO2005/047499) or variant thereof with one or more, in particular all, of the following substitutions: F100D, S283G, N456E, F512Y; Aspergillus fumigatus xylanase (e.g., Xyl III in WO2006/078256), CBH I from Aspergillus fumigatus, in particular Cel7A CBH I disclosed as SEQ ID NO: 2 in WO2011/057140, and CBH II derived from Aspergillus fumigatus, in particular the one disclosed in WO2013/028928.

[0716] In another embodiment the cellulolytic enzyme composition is a Trichoderma reesei cellulolytic enzyme composition comprising the CBH I (GENSEQP Accession No. AZY49536 (WO2012/103293); a CBH II (GENSEQP Accession No. AZY49446 (WO2012/103288); a beta-glucosidase variant (GENSEQP Accession No. AZU67153 (WO2012/44915)), in particular with one or more, in particular all, of the following substitutions: F100D, S283G, N456E, F512Y; and AA9 (GH61 polypeptide) (GENSEQP Accession No. BAL61510 (WO2013/028912)).

[0717] In another embodiment the cellulolytic enzyme composition is a Trichoderma reesei cellulolytic enzyme composition comprising a CBH I (GENSEQP Accession No. AZY49536 (WO2012/103293)); a CBH II (GENSEQP Accession No. AZY49446 (WO2012/103288); a GH10 xylanase (GENSEQP Accession No. BAK46118 (WO2013/019827)); and a beta-xylosidase (GENSEQP Accession No. AZI04896 (WO2011/057140)).

[0718] In another embodiment the cellulolytic enzyme composition is a Trichoderma reesei cellulolytic enzyme composition comprising a CBH I (GENSEQP Accession No. AZY49536 (WO2012/103293)); a CBH II (GENSEQP Accession No. AZY49446 (WO2012/103288)); and an AA9 (GH61 polypeptide; GENSEQP Accession No. BAL61510 (WO2013/028912)).

[0719] In another embodiment the cellulolytic enzyme composition is a Trichoderma reesei cellulolytic enzyme composition comprising a CBH I (GENSEQP Accession No. AZY49536 (WO2012/103293)); a CBH II (GENSEQP Accession No. AZY49446 (WO2012/103288)), an AA9 (GH61 polypeptide; GENSEQP Accession No. BAL61510 (WO2013/028912)), and a catalase (GENSEQP Accession No. BAC11005 (WO2012/130120)).

[0720] In an embodiment the cellulolytic enzyme composition is a Trichoderma reesei cellulolytic enzyme composition comprising a CBH I (GENSEQP Accession No. AZY49446 (WO2012/103288); a CBH II (GENSEQP Accession No. AZY49446 (WO2012/103288)), a beta-glucosidase variant (GENSEQP Accession No. AZU67153 (WO2012/44915)), with one or more, in particular all, of the following substitutions: F100D, S283G, N456E, F512Y; an AA9 (GH61 polypeptide; GENSEQP Accession No. BAL61510 (WO2013/028912)), a GH10 xylanase (GENSEQP Accession No. BAK46118 (WO 2013/019827)), and a beta-xylosidase (GENSEQP Accession No. AZI04896 (WO2011/057140)).

[0721] In an embodiment the cellulolytic composition is a Trichoderma reesei cellulolytic enzyme preparation comprising an EG I (Swissprot Accession No. P07981), EG II (EMBL Accession No. M19373), CBH I (supra); CBH II (supra); beta-glucosidase variant (supra) with the following substitutions: F100D, S283G, N456E, F512Y; an AA9 (GH61 polypeptide; supra), GH10 xylanase (supra); and beta-xylosidase (supra).

[0722] All cellulolytic enzyme compositions disclosed in WO02013/028928 are also contemplated and hereby incorporated by reference.

[0723] The cellulolytic enzyme composition comprises or may further comprise one or more (several) proteins selected from the group consisting of a cellulase, a AA9 (i.e., GH61) polypeptide having cellulolytic enhancing activity, a hemicellulase, an expansin, an esterase, a laccase, a ligninolytic enzyme, a pectinase, a peroxidase, a protease, and a swollenin.

[0724] In one embodiment the cellulolytic enzyme composition is a commercial cellulolytic enzyme composition. Examples of commercial cellulolytic enzyme compositions suitable for use in a process of the invention include: CELLIC® CTec (Novozymes A/S), CELLIC® CTec2 (Novozymes A/S), CELLIC® CTec3 (Novozymes A/S), CELLUCLAST™ (Novozymes A/S), SPEZYME™ CP (Genencor Int.), ACCELLERASE™ 1000, ACCELLERASE 1500, ACCELLERASE™ TRIO (DuPont), FILTRASE® NL (DSM); METHAPLUS® S/L 100 (DSM), ROHAMEN™ 7069 W (Röhm GmbH), or ALTERNAFUEL® CMAX3™ (Dyadic International, Inc.). The cellulolytic enzyme composition may be added in an amount effective from about 0.001 to about 5.0 wt. % of solids, e.g., about 0.025 to about 4.0 wt. % of solids or about 0.005 to about 2.0 wt. % of solids.

[0725] Additional enzymes, and compositions thereof can be found in WO02011/153516 and WO02016/045569 (the contents of which are incorporated herein).

[0726] Additional polynucleotides encoding suitable cellulolytic enzymes may be obtained from microorganisms of any genus, including those readily available within the UniProtKB database.

[0727] The cellulolytic enzyme coding sequences can also be used to design nucleic acid probes to identify and clone DNA encoding cellulolytic enzymes from strains of different genera or species, as described supra.

[0728] The polynucleotides encoding cellulolytic enzymes may also be identified and obtained from other sources including microorganisms isolated from nature (e.g., soil, composts, water, etc.) or DNA samples obtained directly from natural materials (e.g., soil, composts, water, etc.) as described supra.

[0729] Techniques used to isolate or clone polynucleotides encoding cellulolytic enzymes are described supra.

[0730] In one embodiment, the cellulolytic enzyme has a mature polypeptide sequence of at least 60%, e.g., at least 65%, at least 70%, at least 75%, at least 80%, at least 85%, at least 90%, at least 91%, at least 92%, at least 93%, at least 94%, at least 95%, at least 96%, at least 97%, at least 98%, at least 99%, or 100% sequence identity to any cellulolytic enzyme described or referenced herein (e.g., any endoglucanase, cellobiohydrolase, or beta-glucosidase). In one embodiment, the cellulolytic enzyme ha a mature polypeptide sequence that differs by no more than ten amino acids, e.g., by no more than five amino acids, by no more than four amino acids, by no more than three amino acids, by no more than two amino acids, or by one amino acid from any cellulolytic enzyme described or referenced herein. In one embodiment, the cellulolytic enzyme has a mature polypeptide sequence that comprises or consists of the amino acid sequence of any cellulolytic enzyme described or referenced herein, allelic variant, or a fragment thereof having cellulolytic enzyme activity. In one embodiment, the cellulolytic enzyme has an amino acid substitution, deletion, and/or insertion of one or more (e.g., two, several) amino acids. In some embodiments, the total number of amino acid substitutions, deletions and/or insertions is not more than 10, e.g., not more than 9, 8, 7, 6, 5, 4, 3, 2, or 1.

[0731] In some embodiments, the cellulolytic enzyme has at least 20%, e.g., at least 40%, at least 50%, at least 60%, at least 70%, at least 80%, at least 90%, at least 95%, at least 96%, at least 97%, at least 98%, at least 99%, or 100% of the cellulolytic enzyme activity of any cellulolytic enzyme described or referenced herein (e.g., any endoglucanase, cellobiohydrolase, or beta-glucosidase) under the same conditions.

[0732] In one embodiment, the cellulolytic enzyme coding sequence hybridizes under at least low stringency conditions, e.g., medium stringency conditions, medium-high stringency conditions, high stringency conditions, or very high stringency conditions with the full-length complementary strand of the coding sequence from any cellulolytic enzyme described or referenced herein (e.g., any endoglucanase, cellobiohydrolase, or beta-glucosidase). In one embodiment, the cellulolytic enzyme coding sequence has at least 65%, e.g., at least 70%, at least 75%, at least 80%, at least 85%, at least 85%, at least 90%, at least 91%, at least 92%, at least 93%, at least 94%, at least 95%, at least 96%, at least 97%, at least 98%, at least 99%, or 100% sequence identity with the coding sequence from any cellulolytic enzyme described or referenced herein.

[0733] In one embodiment, the polynucleotide encoding the cellulolytic enzyme comprises the coding sequence of any cellulolytic enzyme described or referenced herein (e.g., any endoglucanase, cellobiohydrolase, or beta-glucosidase). In one embodiment, the polynucleotide encoding the cellulolytic enzyme comprises a subsequence of the coding sequence from any cellulolytic enzyme described or referenced herein, wherein the subsequence encodes a polypeptide having cellulolytic enzyme activity. In one embodiment, the number of nucleotides residues in the subsequence is at least 75%, e.g., at least 80%, 85%, 90%, or 95% of the number of the referenced coding sequence.

[0734] The cellulolytic enzyme can also include fused polypeptides or cleavable fusion polypeptides, as described supra.

### Fermentation Products

[0735] A fermentation product can be any substance derived from the fermentation. The fermentation product can be, without limitation, an alcohol (e.g., arabinitol, n-butanol, isobutanol, ethanol, glycerol, methanol, ethylene glycol, 1,3-propanediol [propylene glycol], butanediol, glycerin, sorbitol, and xylitol); an alkane (e.g., pentane, hexane, heptane, octane, nonane, decane, undecane, and dodecane), a cycloalkane (e.g., cyclopentane, cyclohexane, cycloheptane, and cyclooctane), an alkene (e.g., pentene, hexene, heptene, and octene); an amino acid (e.g., aspartic acid, glutamic acid, glycine, lysine, serine, and threonine); a gas (e.g., methane, hydrogen (H₂), carbon dioxide (CO₂), and carbon monoxide (CO)); isoprene; a ketone (e.g., acetone); an organic acid (e.g., acetic acid, acetonic acid, adipic acid, ascorbic acid, citric acid, 2,5-diketo-D-gluconic acid, formic acid, fumaric acid, glucaric acid, gluconic acid, glucuronic acid, glutaric acid, 3-hydroxypropionic acid, itaconic acid, lactic acid, malic acid, malonic acid, oxalic acid, oxaloacetic acid, propionic acid, succinic acid, and xylonic acid); and polyketide.

[0736] In one embodiment, the fermentation product is an alcohol. The term “alcohol” encompasses a substance that contains one or more hydroxyl moieties. The alcohol can be, but is not limited to, n-butanol, isobutanol, ethanol, methanol, arabinitol, butanediol, ethylene glycol, glycerin, glycerol, 1,3-propanediol, sorbitol, xylitol. See, for example, Gong et al., 1999, Ethanol production from renewable resources, in Advances in Biochemical Engineering/Biotechnology, Scheper, T., ed., Springer-Verlag Berlin Heidelberg, Germany, 65: 207-241; Silveira and Jonas, 2002, Appl. Microbiol. Biotechnol. 59: 400-408; Nigam and Singh, 1995, Process Biochemistry 30(2): 117-124; Ezeji et al., 2003, World Journal of Microbiology and Biotechnology 19(6): 595-603. In one embodiment, the fermentation product is ethanol.

[0737] In another embodiment, the fermentation product is an alkane. The alkane may be an unbranched or a branched alkane. The alkane can be, but is not limited to, pentane, hexane, heptane, octane, nonane, decane, undecane, or dodecane.

[0738] In another embodiment, the fermentation product is a cycloalkane. The cycloalkane can be, but is not limited to, cyclopentane, cyclohexane, cycloheptane, or cyclooctane.

[0739] In another embodiment, the fermentation product is an alkene. The alkene may be an unbranched or a branched alkene. The alkene can be, but is not limited to, pentene, hexene, heptene, or octene.

[0740] In another embodiment, the fermentation product is an amino acid. The organic acid can be, but is not limited to, aspartic acid, glutamic acid, glycine, lysine, serine, or threonine. See, for example, Richard and Margaritis, 2004, Biotechnology and Bioengineering 87(4): 501-515.

[0741] In another embodiment, the fermentation product is a gas. The gas can be, but is not limited to, methane, H₂, CO₂, or CO. See, for example, Kataoka et al., 1997, Water Science and Technology 36(6-7): 41-47; and Gunaseelan, 1997, Biomass and Bioenergy 13(1-2): 83-114.

[0742] In another embodiment, the fermentation product is isoprene.

[0743] In another embodiment, the fermentation product is a ketone. The term “ketone” encompasses a substance that contains one or more ketone moieties. The ketone can be, but is not limited to, acetone.

[0744] In another embodiment, the fermentation product is an organic acid. The organic acid can be, but is not limited to, acetic acid, acetonic acid, adipic acid, ascorbic acid, citric acid, 2,5-diketo-D-gluconic acid, formic acid, fumaric acid, glucaric acid, gluconic acid, glucuronic acid, glutaric acid, 3-hydroxypropionic acid, itaconic acid, lactic acid, malic acid, malonic acid, oxalic acid, propionic acid, succinic acid, or xylonic acid. See, for example, Chen and Lee, 1997, Appl. Biochem. Biotechnol. 63-65: 435-448.

[0745] In another embodiment, the fermentation product is polyketide.

[0746] In some embodiments, the host cell or fermenting organism (or processes thereof), provide higher yield of fermentation product (e.g., ethanol) when compared to the same cell without the L-xylulose reductase (LXR) described herein under the same conditions (e.g., after 40 hours of fermentation). In some embodiments, the host cell or fermenting organism (or process thereof) is capable of higher ethanol production compared to the same cell encoding the L-xylulose reductase (LXR) of SEQ ID NO: 305 under the same conditions (e.g., after 40 hours of fermentation) In some embodiments, the process results in at least 0.25%, such as 0.5%, 0.75%, 1.0%, 1.25%, 1.5%, 1.75%, 2%, 3% or 5% higher yield of the fermentation product (e.g., ethanol).

### Recovery

[0747] The fermentation product, e.g., ethanol, can optionally be recovered from the fermentation medium using any method known in the art including, but not limited to, chromatography, electrophoretic procedures, differential solubility, distillation, or extraction. For example, alcohol is separated from the fermented cellulosic material and purified by conventional methods of distillation. Ethanol with a purity of up to about 96 vol. % can be obtained, which can be used as, for example, fuel ethanol, drinking ethanol, i.e., potable neutral spirits, or industrial ethanol.

[0748] In some embodiments of the methods, the fermentation product after being recovered is substantially pure. With respect to the methods herein, “substantially pure” intends a recovered preparation that contains no more than 15% impurity, wherein impurity intends compounds other than the fermentation product (e.g., ethanol). In one variation, a substantially pure preparation is provided wherein the preparation contains no more than 25% impurity, or no more than 20% impurity, or no more than 10% impurity, or no more than 5% impurity, or no more than 3% impurity, or no more than 1% impurity, or no more than 0.5% impurity.

[0749] Suitable assays to test for the production of ethanol and contaminants, and sugar consumption can be performed using methods known in the art. For example, ethanol product, as well as other organic compounds, can be analyzed by methods such as HPLC (High Performance Liquid Chromatography), GC-MS (Gas Chromatography Mass Spectroscopy) and LC-MS (Liquid Chromatography-Mass Spectroscopy) or other suitable analytical methods using routine procedures well known in the art. The release of ethanol in the fermentation broth can also be tested with the culture supernatant. Byproducts and residual sugar in the fermentation medium (e.g., glucose or xylose) can be quantified by HPLC using, for example, a refractive index detector for glucose and alcohols, and a UV detector for organic acids (Lin et al., Biotechnol. Bioeng. 90:775-779 (2005)), or using other suitable assay and detection methods well known in the art.

The invention may further be described in the following numbered paragraphs:
Paragraph [1]. A recombinant host cell having an active arabinose fermentation pathway, wherein the cell comprises:

[0750] (i) a heterologous polynucleotide encoding an aldose reductase (AR),

[0751] (ii) a heterologous polynucleotide encoding a L-arabinitol 4-dehydrogenase (LAD), and

[0752] (iii) a heterologous polynucleotide encoding a L-xylulose reductase (LXR);

[0753] wherein the L-xylulose reductase (LXR) has a mature polypeptide sequence with at least 60%, e.g., at least 65%, 70%, 75%, 80%, 85%, 90%, 95%, 97%, 98%, 99%, or 100% sequence identity to any one of SEQ ID NOs: 297, 300, 302 and 304.

Paragraph [2]. The recombinant host cell of paragraph [1], wherein the L-xylulose reductase (LXR) has a mature polypeptide sequence that differs by no more than ten amino acids, e.g., by no more than five amino acids, by no more than four amino acids, by no more than three amino acids, by no more than two amino acids, or by one amino acid from any one of SEQ ID NOs: 297, 300, 302 and 304.
Paragraph [3]. The recombinant host cell of paragraph [1] or [2], wherein the L-xylulose reductase (LXR) has a mature polypeptide sequence comprising or consisting of the amino acid sequence of any one of SEQ ID NOs: 297, 300, 302 and 304.
Paragraph [4]. The recombinant host cell of any one of paragraphs [1]-[3], wherein the aldose reductase (AR) has a mature polypeptide sequence with at least 60%, e.g., at least 65%, 70%, 75%, 80%, 85%, 90%, 95%, 97%, 98%, 99%, or 100% sequence identity to any one of SEQ ID NOs: 281-285.
Paragraph [5]. The recombinant host cell of any one of paragraphs [1]-[4], wherein the aldose reductase (AR) has a mature polypeptide sequence that differs by no more than ten amino acids, e.g., by no more than five amino acids, by no more than four amino acids, by no more than three amino acids, by no more than two amino acids, or by one amino acid from any one of SEQ ID NOs: 281-285.
Paragraph [6]. The recombinant host cell of any one of paragraphs [1]-[5], wherein the aldose reductase (AR) has a mature polypeptide sequence comprising or consisting of the amino acid sequence of any one of SEQ ID NOs: 281-285.
Paragraph [7]. The recombinant host cell of any one of paragraphs [1]-[6], wherein the L-arabinitol 4-dehydrogenase (LAD) has a mature polypeptide sequence with at least 60%, e.g., at least 65%, 70%, 75%, 80%, 85%, 90%, 95%, 97%, 98%, 99%, or 100% sequence identity to any one of SEQ ID NOs: 286-296.
Paragraph [8]. The recombinant host cell of any one of paragraphs [1]-[7], wherein the wherein the L-arabinitol 4-dehydrogenase (LAD) has a mature polypeptide sequence differs by no more than ten amino acids, e.g., by no more than five amino acids, by no more than four amino acids, by no more than three amino acids, by no more than two amino acids, or by one amino acid from any one of SEQ ID NOs: 286-296.
Paragraph [9]. The recombinant host cell of any one of paragraphs [1]-[8], wherein the L-arabinitol 4-dehydrogenase (LAD) has a mature polypeptide sequence comprising or consisting of the amino acid sequence of any one of SEQ ID NOs: 286-296.
Paragraph [10]. The recombinant host cell of any one of paragraphs [1]-[9], wherein the cell further comprises one or more heterologous polynucleotides selected from:

[0754] (iv) a heterologous polynucleotide encoding a xylitol dehydrogenase (XDH); and

[0755] (v) a heterologous polynucleotide encoding a xylulokinase (XK).

Paragraph [11]. The recombinant host cell of paragraph [10], wherein the xylitol dehydrogenase (XDH) has a mature polypeptide sequence with at least 60%, e.g., at least 65%, 70%, 75%, 80%, 85%, 90%, 95%, 97%, 98%, 99%, or 100% sequence identity to SEQ ID NO: 309.
Paragraph [12]. The recombinant host cell of paragraph [10] or [11], wherein the xylitol dehydrogenase (XDH) has a mature polypeptide sequence that differs by no more than ten amino acids, e.g., by no more than five amino acids, by no more than four amino acids, by no more than three amino acids, by no more than two amino acids, or by one amino acid from of SEQ ID NO: 309.
Paragraph [13]. The recombinant host cell of any one of paragraphs [10]-[12], wherein the xylitol dehydrogenase (XDH) has a mature polypeptide sequence comprising or consisting of the amino acid sequence of SEQ ID NO: 309.
Paragraph [14]. The recombinant host cell of any one of paragraphs [10]-[13], wherein the xylulokinase (XK) has a mature polypeptide sequence with at least 60%, e.g., at least 65%, 70%, 75%, 80%, 85%, 90%, 95%, 97%, 98%, 99%, or 100% sequence identity to SEQ ID NO: 75, SEQ ID NO: 310 or SEQ ID NO: 311.
Paragraph [15]. The recombinant host cell of any one of paragraphs [10]-[14], wherein the xylulokinase (XK) has a mature polypeptide sequence that differs by no more than ten amino acids, e.g., by no more than five amino acids, by no more than four amino acids, by no more than three amino acids, by no more than two amino acids, or by one amino acid from of SEQ ID NO: 75, SEQ ID NO: 310 or SEQ ID NO: 311.
Paragraph [16]. The recombinant host cell of any one of paragraphs [10]-[15], wherein the xylulokinase (XK) has a mature polypeptide sequence comprising or consisting of the amino acid sequence of SEQ ID NO: 75, SEQ ID NO: 310 or SEQ ID NO: 311.
Paragraph [17]. The recombinant host cell of any one of paragraphs [1]-[16], wherein the heterologous polynucleotide of (i), (ii), (iii), (iv) and/or (v) is operably linked to a promoter that is foreign to the polynucleotide.
Paragraph [18]. The recombinant host cell of any one of paragraphs [1]-[17], wherein the cell further comprises heterologous polynucleotide encoding a non-phosphorylating NADP-dependent glyceraldehyde-3-phosphate dehydrogenase (GAPN).
Paragraph [19]. The recombinant host cell of paragraph [18], wherein the heterologous polynucleotide encoding the NADP-dependent glyceraldehyde-3-phosphate dehydrogenase (GAPN) is operably linked to a promoter that is foreign to the polynucleotide.
Paragraph [20]. The recombinant host cell of paragraph [18] or [19], wherein the heterologous polynucleotide encodes a non-phosphorylating NADP-dependent glyceraldehyde-3-phosphate dehydrogenase (GAPN) having a mature polypeptide sequence with at least 60%, e.g., at least 65%, 70%, 75%, 80%, 85%, 90%, 95%, 97%, 98%, 99%, or 100% sequence identity to any one of SEQ ID NOs: 262-280.
Paragraph [21]. The recombinant host cell of any one of paragraphs [18]-[20], wherein the heterologous polynucleotide encodes a non-phosphorylating NADP-dependent glyceraldehyde-3-phosphate dehydrogenase (GAPN) having a mature polypeptide sequence that differs by no more than ten amino acids, e.g., by no more than five amino acids, by no more than four amino acids, by no more than three amino acids, by no more than two amino acids, or by one amino acid from any one of SEQ ID NOs: 262-280.
Paragraph [22]. The recombinant host cell of any one of paragraphs [18]-[21], wherein the heterologous polynucleotide encodes a non-phosphorylating NADP-dependent glyceraldehyde-3-phosphate dehydrogenase (GAPN) has a mature polypeptide sequence comprising or consisting of the amino acid sequence of any one of SEQ ID NOs: 262-280.
Paragraph [23]. The recombinant host cell of paragraphs [1]-[22], wherein the cell further comprises an active xylose fermentation pathway.
Paragraph [24]. The recombinant host cell of paragraph [23], wherein the cell comprises one or more heterologous polynucleotides selected from:
a heterologous polynucleotide encoding a xylose isomerase (X), and
a heterologous polynucleotide encoding a xylulokinase (XK).
Paragraph [25]. The recombinant host cell of paragraph [23] or [24], wherein the cell comprises one or more heterologous polynucleotides selected from:
a heterologous polynucleotide encoding an aldose reductase (AR),
a heterologous polynucleotide encoding a xylitol dehydrogenase (XDH), and
a heterologous polynucleotide encoding a xylulokinase (XK).
Paragraph [26]. The recombinant host cell of any one of paragraphs [1]-[25], wherein the cell further comprises a heterologous polynucleotide encoding a glucoamylase.
Paragraph [27]. The recombinant host cell of paragraph [26], wherein the glucoamylase has a mature polypeptide sequence with at least 60%, e.g., at least 65%, 70%, 75%, 80%, 85%, 90%, 95%, 97%, 98%, 99%, or 100% sequence identity the amino acid sequence of any one of SEQ ID NOs: 8, 102-113, 229, 230 and 244-250.
Paragraph [28]. The recombinant host cell of paragraph [26] or [27], wherein the heterologous polynucleotide encoding the glucoamylase is operably linked to a promoter that is foreign to the polynucleotide.
Paragraph [29]. The recombinant host cell of any one of paragraphs [1]-[28], wherein the cell further comprises a heterologous polynucleotide encoding an alpha-amylase.
Paragraph [30]. The recombinant host cell of paragraph [29], wherein the alpha-amylase has a mature polypeptide sequence with at least 60%, e.g., at least 65%, 70%, 75%, 80%, 85%, 90%, 95%, 97%, 98%, 99%, or 100% sequence identity the amino acid sequence of any one of SEQ ID NOs: 76-101, 121-174, 231 and 251-256.
Paragraph [31]. The recombinant host cell of paragraph [28] or [29], wherein the heterologous polynucleotide encoding the alpha-amylase is operably linked to a promoter that is foreign to the polynucleotide.
Paragraph [32]. The recombinant host cell of any one of paragraphs [1]-[31], wherein the cell further comprises a heterologous polynucleotide encoding a phospholipase.
Paragraph [33]. The recombinant host cell of paragraph [32], wherein the phospholipase has a mature polypeptide sequence with at least 60%, e.g., at least 65%, 70%, 75%, 80%, 85%, 90%, 95%, 97%, 98%, 99%, or 100% sequence identity the amino acid sequence of any one of SEQ ID NOs: 235, 236, 237, 238, 239, 240, 241 and 242.
Paragraph [34]. The recombinant host cell of paragraph [32] or [33], wherein the heterologous polynucleotide encoding phospholipase is operably linked to a promoter that is foreign to the polynucleotide.
Paragraph [35]. The recombinant host cell of any one of paragraphs [1]-[34], wherein the cell further comprises a heterologous polynucleotide encoding a trehalase.
Paragraph [36]. The recombinant host cell of paragraph [35], wherein the trehalase has a mature polypeptide sequence with at least 60%, e.g., at least 65%, 70%, 75%, 80%, 85%, 90%, 95%, 97%, 98%, 99%, or 100% sequence identity the amino acid sequence of any one of SEQ ID NOs: 175-226.
Paragraph [37]. The recombinant host cell of paragraph [35] or [36], wherein the heterologous polynucleotide encoding the trehalase is operably linked to a promoter that is foreign to the polynucleotide.
Paragraph [38]. The recombinant host cell of any one of paragraphs [1]-[37], wherein the cell further comprises a heterologous polynucleotide encoding a protease.
Paragraph [39]. The recombinant host cell of paragraph [38], wherein the protease has a mature polypeptide sequence with at least 60%, e.g., at least 65%, 70%, 75%, 80%, 85%, 90%, 95%, 97%, 98%, 99%, or 100% sequence identity the amino acid sequence of any one of SEQ ID NOs: 9-73.
Paragraph [40]. The recombinant host cell of paragraph [38] or [39], wherein the heterologous polynucleotide encoding the protease is operably linked to a promoter that is foreign to the polynucleotide.
Paragraph [41]. The recombinant host cell of any one of paragraphs [1]-[40], wherein the cell further comprises a heterologous polynucleotide encoding a pullulanase.
Paragraph [42]. The recombinant host cell of paragraph [41], wherein the pullulanase has a mature polypeptide sequence with at least 60%, e.g., at least 65%, 70%, 75%, 80%, 85%, 90%, 95%, 97%, 98%, 99%, or 100% sequence identity the amino acid sequence of any one of SEQ ID NOs: 114-120.
Paragraph [43]. The recombinant host cell of paragraph [41] or [42], wherein the heterologous polynucleotide encoding the pullulanase is operably linked to a promoter that is foreign to the polynucleotide.
Paragraph [44]. The recombinant host cell of any one of paragraphs [1]-[43], wherein the cell is capable of higher anaerobic growth rate on pentose (e.g., xylose and/or arabinose) compared to the same cell without the heterologous polynucleotide encoding a L-xylulose reductase (LXR) (e.g., under conditions described in Example 2).
Paragraph [45]. The recombinant host cell of any one of paragraphs [1]-[44], wherein the cell is capable of higher anaerobic growth rate on pentose (e.g., xylose and/or arabinose) compared to the same cell encoding the L-xylulose reductase (LXR) of SEQ ID NO: 305 (e.g., under conditions described in Example 2).
Paragraph [46]. The recombinant host cell of any one of paragraphs [1]-[45], wherein the cell is capable of a higher rate of pentose consumption (e.g., at least 5%, 10%, 15%, 20%, 25%, 30%, 35%, 40%, 45%, 50%, 60%, 75% or 90% higher xylose and/or arabinose consumption) compared to the same cell without the heterologous polynucleotide encoding a L-xylulose reductase (LXR) (e.g., under conditions described in Example 2).
Paragraph [47]. The recombinant host cell of any one of paragraphs [1]-[45], wherein the cell is capable of a higher rate of pentose consumption (e.g., at least 5%, 10%, 15%, 20%, 25%, 30%, 35%, 40%, 45%, 50%, 60%, 75% or 90% higher xylose and/or arabinose consumption) compared to the same cell encoding the L-xylulose reductase (LXR) of SEQ ID NO: 305 (e.g., under conditions described in Example 2).
Paragraph [48]. The recombinant host cell of any one of paragraphs [1]-[47], wherein the cell is capable of higher pentose consumption (e.g., xylose and/or arabinose) compared to the same cell without the heterologous polynucleotide encoding a L-xylulose reductase (LXR) at about or after 120 hours fermentation (e.g., under conditions described in Example 2).
Paragraph [49]. The recombinant host cell of any one of paragraphs [1]-[48], wherein the cell is capable of higher pentose consumption (e.g., xylose and/or arabinose) compared to the same cell encoding the L-xylulose reductase (LXR) of SEQ ID NO: 305 at about or after 120 hours fermentation (e.g., under conditions described in Example 2).
Paragraph [50]. The recombinant host cell of paragraph [48] or [49], wherein the cell is capable of consuming more than 65%, e.g., at least 70%, 75%, 80%, 85%, 90%, 95% of pentose (e.g., xylose and/or arabinose) in the medium at about or after 120 hours fermentation (e.g., under conditions described in Example 2).
Paragraph [51]. The recombinant host cell of any one of paragraphs [1]-[50], wherein the cell is capable of higher ethanol production compared to the same cell without the heterologous polynucleotide of (i), (ii), (iii), (iv) and/or (v) under the same conditions (e.g., after 40 hours of fermentation).
Paragraph [52]. The recombinant host cell of any one of paragraphs [1]-[51], wherein the cell is capable of higher ethanol production compared to the same cell encoding the L-xylulose reductase (LXR) of SEQ ID NO: 305 under the same conditions (e.g., after 40 hours of fermentation).
Paragraph [53]. The recombinant host cell of any one of paragraphs [1]-[52], wherein the cell further comprises a heterologous polynucleotide encoding a transketolase (TKL1).
Paragraph [54]. The recombinant host cell of any one of paragraphs [1]-[53], wherein the cell further comprises a heterologous polynucleotide encoding a transaldolase (TAL1).
Paragraph [55]. The recombinant host cell of any one of paragraphs [1]-[54], wherein the cell further comprises a disruption to an endogenous gene encoding a glycerol 3-phosphate dehydrogenase (GPD).
Paragraph [56]. The recombinant host cell of any one of paragraphs [1]-[55], wherein the cell further comprises a disruption to an endogenous gene encoding a glycerol 3-phosphatase (GPP).
Paragraph [57]. The recombinant host cell of paragraph [55] or [56], wherein the GPD and/or GPP gene is inactivated.
Paragraph [58]. The recombinant yeast cell of any of paragraphs [1]-[57], wherein the cell produces a decreased amount of glycerol (e.g., at least 25% less, at least 50% less, at least 60% less, at least 70% less, at least 80% less, or at least 90% less) compared to the cell without the disruption to the endogenous gene encoding the GPD and/or GPP when cultivated under identical conditions.
Paragraph [59]. The recombinant host cell of any one of paragraphs [1]-[58], wherein the cell is a yeast cell.
Paragraph [60]. The recombinant host cell of any one of paragraphs [1]-[59], wherein the cell is a Saccharomyces, Rhodotorula, Schizosaccharomyces, Kuyveromyces, Pichia, 15 Hansenula, Rhodosporidium, Candida, Yarrowia, Lipomyces, Cryptococcus, or Dekkera sp. cell.
Paragraph [61]. The recombinant host cell of any one of paragraphs [1]-[60], wherein the cell is a Saccharomyces cerevisiae cell.
Paragraph [62]. A composition comprising the recombinant host cell of any one of paragraphs [1]-[61] and one or more naturally occurring and/or non-naturally occurring components, such as components are selected from the group consisting of: surfactants, emulsifiers, gums, swelling agents, and antioxidants.
Paragraph [63]. A method of producing a derivative of a recombinant host cell of any one of paragraphs [1]-[61], the method comprising:
[0756] (a) providing:
   [0757] (i) a first host cell; and
   [0758] (ii) a second host cell, wherein the second host cell is a recombinant host cell of any one of paragraphs [1]-[61];
[0759] (b) culturing the first host cell and the second host cell under conditions which permit combining of DNA between the first and second host cells;
[0760] (c) screening or selecting for a derive host cell.
   Paragraph [64]. A method of producing a fermentation product from a starch-containing or cellulosic-containing material, the method comprising:

[0761] (a) saccharifying the starch-containing or cellulosic-containing material; and

[0762] (b) fermenting the saccharified material of step (a) with the recombinant host cell of any one of paragraphs [1]-[61] under suitable conditions to produce the fermentation product.

Paragraph [65]. The method of paragraph [64], wherein saccharification of step (a) occurs on a starch-containing material, and wherein the starch-containing material is either gelatinized or ungelatinized starch.
Paragraph [66]. The method of paragraph [65], comprising liquefying the starch-containing material by contacting the material with an alpha-amylase prior to saccharification.
Paragraph [67]. The method of paragraph [65] or [66], wherein liquefying the starch-containing material and/or saccharifying the starch-containing material is conducted in presence of exogenously added protease.
Paragraph [68]. The method of any one of paragraphs [64]-[67], wherein fermentation is performed under reduced nitrogen conditions (e.g., less than 1000 ppm urea or ammonium hydroxide, such as less than 750 ppm, less than 500 ppm, less than 400 ppm, less than 300 ppm, less than 250 ppm, less than 200 ppm, less than 150 ppm, less than 100 ppm, less than 75 ppm, less than 50 ppm, less than 25 ppm, or less than 10 ppm).
Paragraph [69]. The method of any one of paragraphs [64]-[68], wherein fermentation and saccharification are performed simultaneously in a simultaneous saccharification and fermentation (SSF).
Paragraph [70]. The method of any one of paragraphs [64]-[68], wherein fermentation and saccharification are performed sequentially (SHF).
Paragraph [71]. The method of any one of paragraphs paragraph [64]-[70], comprising recovering the fermentation product from the fermentation.
Paragraph [72]. The method of paragraph [71], wherein recovering the fermentation product from the fermentation comprises distillation.
Paragraph [73]. The method of any one of paragraphs [64]-[72], wherein the fermentation product is ethanol.
Paragraph [74]. The method of any one of paragraphs [64]-[72], wherein step (a) comprises contacting the cellulosic and/or starch-containing with an enzyme composition.
Paragraph [75]. The method of any one of paragraphs [64]-[74], wherein saccharification occurs on a cellulosic material, and wherein the cellulosic material is pretreated.
Paragraph [76]. The method of paragraph [75], wherein the pretreatment is a dilute acid pretreatment.
Paragraph [77]. The method of paragraph [75] or [76], wherein saccharification occurs on a cellulosic material, and wherein step (a) comprises contacting the cellulosic enzyme composition, and wherein the enzyme composition comprises one or more enzymes selected from a cellulase, an AA9 polypeptide, a hemicellulase, a CIP, an esterase, an expansin, a ligninolytic enzyme, an oxidoreductase, a pectinase, a protease, and a swollenin.
Paragraph [78]. The method of paragraph [77], wherein the cellulase is one or more enzymes selected from an endoglucanase, a cellobiohydrolase, and a beta-glucosidase.
Paragraph [79]. The method of paragraph [77] or [78], wherein the hemicellulase is one or more enzymes selected a xylanase, an acetylxylan esterase, a feruloyl esterase, an arabinofuranosidase, a xylosidase, and a glucuronidase.
Paragraph [80]. The method of any one of paragraphs [64]-[79], wherein the method results in higher yield of fermentation product when compared to the method using the same cell without the heterologous polynucleotide of (i), (ii), (iii), (iv) and/or (v) under the same conditions.
Paragraph [81]. The method of any one of paragraphs [64]-[80], wherein the method results in higher yield of fermentation product when compared to the method using compared to the same cell encoding the L-xylulose reductase (LXR) of SEQ ID NO: 305 under the same conditions.
Paragraph [82]. The method of paragraph [80] or [81], wherein the method results in at least 0.25% (e.g., 0.5%, 0.75%, 1.0%, 1.25%, 1.5%, 1.75%, 2%, 3% or 5%) higher yield of fermentation product.
Paragraph [83]. The method of any one of paragraphs [64]-[82], wherein fermentation is conducted under low oxygen (e.g., anaerobic) conditions.
Paragraph [84]. The method of any one of paragraphs [64]-[83] wherein a greater amount of pentose (e.g., xylose and/or arabinose) is consumed (e.g., at least 5%, 10%, 15%, 20%, 25%, 30%, 35%, 40%, 45%, 50%, 60%, 75% or 90% more) when compared to the method using the same cell without the heterologous polynucleotide encoding a L-xylulose reductase (LXR) (e.g., under conditions described in Example 2).

[0763] Paragraph 85. The method of any one of paragraphs [64]-[84] wherein a greater amount of pentose (e.g., xylose and/or arabinose) is consumed (e.g., at least 5%, 10%, 15%, 20%, 25%, 30%, 35%, 40%, 45%, 50%, 60%, 75% or 90% more) when compared to the method using the same cell encoding the L-xylulose reductase (LXR) of SEQ ID NO: 305 (e.g., under conditions described in Example 2).

Paragraph [86]. The method of any one of any one of paragraphs [64]-[85], wherein more than 65%, e.g., at least 70%, 75%, 80%, 85%, 90%, 95% of pentose (e.g., xylose and/or arabinose) in the medium is consumed (e.g., under conditions described in Example 2).
Paragraph [87]. Use of a recombinant host cell of any one of paragraphs [1]-[61] in the production of ethanol.

[0764] The invention described and claimed herein is not to be limited in scope by the specific aspects or embodiments herein disclosed, since these aspects/embodiments are intended as illustrations of several aspects of the invention. Any equivalent aspects are intended to be within the scope of this invention. Indeed, various modifications of the invention in addition to those shown and described herein will become apparent to those skilled in the art from the foregoing description. Such modifications are also intended to fall within the scope of the appended claims. In the case of conflict, the present disclosure including definitions will control. All references are specifically incorporated by reference for that which is described.

[0765] The following examples are offered to illustrate certain aspects/embodiments of the present invention, but not in any way intended to limit the scope of the invention as claimed.

### EXAMPLES

### Materials and Methods

[0766] Chemicals used as buffers and substrates were commercial products of at least reagent grade.

[0767] Yeast strain MBG4779 was prepared according the breeding procedures described in U.S. Pat. No. 8,257,959.

### Example 1: Construction of Yeast Strains Expressing an Active Arabinose Fermentation Pathway

[0768] This example describes the construction of yeast cells containing a heterologous L-arabinose utilization pathway. Eight pieces of DNA containing five pathway genes (AR, LAD, LXR, XDH and XK) with a promoter and terminator each were designed to allow for homologous recombination between the eight DNA fragments into the X-3 locus of the yeast MBG4779.

### Construction of the 5′ Homology and Promoter 1 Containing Fragment (Fragment 1)

[0769] Synthetic linear uncloned DNA containing 300 bp homology to the X-3 site, S. cerevisiae promoter PGK1 (SEQ ID NO: 4) was synthesized by Thermo Fisher Scientific (Waltham, Mass.) and designated 17ABCK7P.

### Construction of Fragment Containing Aldose Reductase (AR) Coding Sequence (Fragment 2)

[0770] Fragment 2 was constructed to contain 50 bp of the 3′ S. cerevisiae promoter PGK1, a aldose reductase (AR) coding sequence, and 50 bp of the 5′ ADH3 terminator. Five DNA fragments were used for fragment 2 each containing a different aldose reductase (Table 8). Two of the XR fragments were synthetic linear uncloned DNA (Twist BioScience, San Francisco, Calif.) and two were originally uncioned synthetic linear but then cloned into a plasmid (GeneArt/Thermo Fisher Scientific, Waltham, Mass.).

[0771] The XR from Scheffersomyces stipitis containing fragment was originated as synthetic linear uncloned DNA that was then cloned into a plasmid using a Zero Blunt™ TOPO™ PCR Cloning Kit for Sequencing (Invitrogen/Thermo Fisher, Carlsbad, Calif.). Transformants were selected on 2XYT+Kan agar plates, and plasmid DNA from transformants was sequenced. One clone that had the correct insert by sequencing was designated pMcTs497, which contained the Scheffersomyces stipitis XR gene with a K270R mutation with 50 bp of the 3′ S. cerevisiae promoter PGK1 and 50 bp of the 5′ ADH3 terminator. The K270R mutation was restored to the wild-type with PCR amplification and a synthetic linear DNA containing the K270 codon. The resulting product of 1057 bp contained 50 bp of the 3′ S. cerevisiae promoter PGK1, Scheffersomyces stipitis aldose reductase gene K270 restored (AR), and 50 bp of the 5′ ADH3 terminator. This PCR product was cloned into a plasmid in the Zero Blunt™ TOPO™ PCR Cloning Kit and designated pMcTs498.

[0772] Synthetic linear DNAs 16ACZYKP and 16ACZYNP were cloned to a plasmid using the Zero Blunt™ TOPO™ PCR Cloning Kit for sequencing. A sequence confirmed plasmid was designated pMcTs499 and pMcTs500 for 16ACZYKP and 16ACZYNP, respectively.

[0773] To generate linear DNA for transformation, plasmids pMcTs498, pMcTs499, pMcTs500 were used as template for PCR. The remaining synthetic linear uncloned DNA was used directly.

TABLE 8
Aldose reductase DNA

| Name | Manufacturer | XR Donor organism | Gene ID | XR SEQ ID | Plasmid |
|---|---|---|---|---|---|
| pMcTs498 | In house | Scheffersomyces stipitis | P31867 | 285 | pMcTs498 |
| 16ACZYKP | GeneArt | Meyerozyma guilliermondii | O94735 | 284 | pMcTs499 |
| 16ACZYNP | GeneArt | Aspergillus niger | A2Q8B5 | 281 | pMcTs500 |
| pSHPs0730B672166SH_H2 | Twist | Magnaporthe oryzae | G4N708 | 283 | N/A |
| pSHPs0730B672166SH_A3 | Twist | Aspergillus oryzae | EFP2C7GS0 | 282 | N/A |

### Construction of Fragment Containing Xylitol Dehydrogenase (XDH) Coding Sequence (Fragment 3)

[0774] Fragment 3 was constructed to contain an S. cerevisiae ADH3 terminator, a TDH3 promoter, a xylitol dehydrogenase (XDH) coding sequence from Scheffersomyces stipitis (comprising the coding sequence of SEQ ID NO: 309), a PDC6 terminator and an ADH1 promoter. The DNA sequence containing these features was PCR amplified from a yeast strain that had been previously engineered with these elements from overlapping synthetic uncloned DNA from GeneArt. A first ADH3 terminator and TDH3 promoter fragment was designated 18ABS7OP, a second 50 bp 3′ TDH3 promoter plus Scheffersomyces stipitis gene plus 50 bp 5′ PDC6 terminator fragment was designated 16ACZYUP, and a third PDC terminator and ADH1 promoter fragment was designated 16ACT3QP. These fragments were assembled in a yeast genome using homologous recombination. The fragment containing all these elements listed above was PCR amplified from genomic DNA of the yeast strain.

### Construction of Fragment Containing Xylulokinase (K) Coding Sequence (Fragment 4)

[0775] Fragment 4 was constructed to contain a 50 bp sequence of the 3′ S. cerevisiae ADH1 promoter, one of two xylulokinase (XK) coding sequences, a S. cerevisiae TEF1 terminator, and S. cerevisiae PMA1 promoter using methods similar to those described herein (Table 9).

TABLE 9
Xylulokinase DNA

| Name | Manufacturer | XR Donor organism | XK SEQ ID | Gene ID |
|---|---|---|---|---|
| 16ACZYSP | GeneArt | Scheffersomyces stipitis | 310 | A3GF74 |
| 16ACZYPP | GeneArt | Aspergillus niger | 311 | Q8X167 |

### Construction of Fragment Containing L-Xylulose Reductase (LXR) Coding Sequence (Fragment 5)

[0776] Fragment 5was constructed to contain one of 12 different L-xylulose reductase coding sequences, each with 50 bp to S. cerevisiae PMA1 promoter at the 5′ end and 50 bp S. cerevisiae STE2 terminator at the 3′ end. Four of the 12 LXRs were originally linear synthetic DNA that was then cloned into a plasmid using the Zero Bunt™ TOPO PCR Cloning Kit for Sequencing. One LXR, 18ABYHTC, was ordered as cloned synthetic DNA. The remaining seven LXRs were linear uncloned synthetic DNA.

TABLE 10
L-xylulose reductase DNA

| Name | Manufacturer | LXR Donor organism | Gene ID | LXR SEQ ID | Plasmid |
|---|---|---|---|---|---|
| 18ABS7LP | GeneArt | Candida arabinofermentans | A0A1E4T269 | 307 | pMcTs501 |
| 18ABS7KP | GeneArt | Ogataea parapolymorpha | E7R859 | 308 | pMcTs502 |
| 17ACWAXP | GeneArt | Trichoderma reesei | Q8NK50 | 305 | pMcTs506 |
| 17ACWAWP | GeneArt | Ambrosiozyma monospora | Q70FD1 | 306 | pMcTs507 |
| 18ABYHTC | GeneArt | Aspergillus niger | G3YG17 | 304 | 18ABYHTC |
| pSHPs0730B672166SH_A2 | Twist | Talaromyces leycettanus | EFP3RCJ9K | 300 | |
| pSHPs0730B672166SH_B2 | Twist | Candida sorboxylosa | EFP5PTNSX | 298 | |
| pSHPs0730B672166SH_C2 | Twist | Aspergillus brasiliensis | EFP7G1BZ1 | 297 | |
| pSHPs0730B672166SH_D2 | Twist | Pichia membranifaciens | EFP16N8ZZ | 303 | |
| pSHPs0730B672166SH_E2 | Twist | Brettanomyces anomalus | EFP480208 | 299 | |
| pSHPs0730B672166SH_F2 | Twist | Kuraishia capsulata | EFP2CH8R5 | 301 | |
| pSHPs0730B672166SH_G2 | Twist | Aspergillus aculeatus | EFP2BNSMN | 302 | |

[0777] Linear synthetic DNAs 18ABS7LP, 18ABS7KP, 17ACWAXP and 17ACWAWP were cloned into a plasmid using the Zero Blunt™ TOPO™ PCR Cloning Kit for Sequencing. A sequence-confirmed plasmid for each DNA was identified and designated the name in Table 8. To create linear DNA for transformation plasmids pMcTs501 pMcTs502, pMcTs506, pMcTs507, and 18ABYHTC were used as template in a PCR reaction. The linear synthetic DNA for the other 7 fragments in Table 10 were used directly in the yeast transformations.

### Construction of the STE2 Terminator and TEF2 Promoter Fragment (Fragment 6)

[0778] Synthetic cloned DNA containing a S. cerevisiae STE2 terminator and a TEF2 promoter was synthesized by Thermo Fisher Scientific and designated 18ABYHUC. To create linear DNA for transformation plasmid 18ABYHUC was used as template in a PCR reaction to generate the desired 844 bp fragment.

### Construction of Fragment Containing L-Arabinitol 4-Dehydrogenase (LAD) Coding Sequence (Fragment 7)

[0779] Fragment 7 was constructed to contain one of 11 different L-arabinitol 4-dehydrogenase coding sequences, each with 50 bp to S. cerevisiae TEF2 promoter at the 5′ end and 50 bp S. cerevisiae PRM9 terminator at the 3′ end. Three of the 12 LXRs were originally linear synthetic DNA that was then cloned into a plasmid using the Zero Blunt™ TOPO™ PCR Cloning Kit for Sequencing. A sequence-confirmed plasmid for each DNA was identified and designated as shown in Table 11. To create linear DNA for transformation, plasmids pMcTs503, pMcTs504, pMcTs505 were used as PCR templates. The linear synthetic DNA for the other eight fragments in Table 9 were used directly in the yeast transformations.

TABLE 11
L-arabinitol 4-dehydrogenase DNA

| Manufacturer | | | | | |
|---|---|---|---|---|---|
| designated name | Manufacturer | LAD Donor organism | Gene ID | LAD SEQ ID | Plasmid |
| 18ABS7RP | GeneArt | Trichoderma reesei | AAE28701 | 287 | pMcTs503 |
| 18ABS7QP | GeneArt | Candida guillermondii | A5DD67 | 288 | pMcTs504 |
| 18ABS7PP | GeneArt | Candida arabinofermentens | A0A1E4SVR6 | 289 | pMcTs505 |
| pSHPs0730B672166SH_A1 | Twist | Penicillium rubens | B6HI95 | 296 | N/A |
| pSHPs0730B672166SH_B1 | Twist | Aspergillus niger | A2QAC0 | 295 | N/A |
| pSHPs0730B672166SH_C1 | Twist | Trichoderma reesei | Q96V44 | 294 | N/A |
| pSHPs0730B672166SH_D1 | Twist | Neurospora crassa | Q7SI09 | 293 | N/A |
| pSHPs0730B672166SH_E1 | Twist | Aspergillus oryzae | Q763T4 | 292 | N/A |
| pSHPs0730B672166SH_F1 | Twist | Talaromyces emersonii | C5J3R8 | 291 | N/A |
| pSHPs0730B672166SH_G1 | Twist | Candida carpophila | EFP5NRTLP | 290 | N/A |
| pSHPs0730B672166SH_H1 | Twist | Meyerozyma caribbica | EFP9CM0L5 | 286 | N/A |

### Construction of the PRM9 Terminator 5′ Homology Containing Fragment (Fragment 8)

[0780] Fragment 8 (17ABCLAP) was constructed as a synthetic linear uncloned DNA from Thermo Fisher Scientific containing 300 bp homology to the X-3 site, S. cerevisiae PMR9 terminator and 300 bp homology to the X-3 site.

Integration of the Linear Fragments to Generate a Yeast with Coding Sequences for Heterologous AR, LAD, LAXR, XDH and XK

[0781] The yeast MBG4779 was transformed with the fragments described above. In each transformation pool a fixed fragment 1,3,6,8 was used and one of the 12 possible described DNAs of fragment 5 (containing an LXR coding sequence). For fragment 2 a pool of the five ARs was used. For fragment 4 a pool of 2 XKs were used. For fragment 7 a pool of 11 LADs was used. To aid homologous recombination of the left, middle and right fragments at the genomic X-3 sites a plasmid containing Cas9 and guide RNA specific to X-3 (pMcTs442) was also used in the transformation. These four components were transformed into the into S. cerevisiae strain MBG4779 following a yeast electroporation protocol. Transformants were selected on YPD+cloNAT to select for transformants that contain the CRISPR/Cas9 plasmid pMcTs442. Transformants were picked using a Q-pix Colony Picking System (Molecular Devices; San Jose, Calif.) to an OmniTray containing 2% arabinose in YNB where arabinose is the sole carbon source. Strains that were able to grow on these plates after 5-7 days at 30° C. were picked into 2% YPD liquid 96-well plates. The plates were grown for two days then glycerol was added to 20% final concentration and the plates were stored at −80° C. until needed. Integration of five gene cassette was verified by PCR with locus specific primers and subsequent sequencing.

[0782] The strains with significant grew on arabinose agar plates described this example are shown in Table 12. Additionally, there were strains that with only slight growth that contained either the A. monospora LXR (Q70FD1) or Kuraishia capsulate LXR (EFP2CH8R5).

TABLE 12

| Strain ID | AR | LAD | LXR | XDH | XK |
|---|---|---|---|---|---|
| S514-C11 | A2Q8B5 | A0A1E4SVR6 | EFP2BNSMN | EFP6RPZ73 | A3GF74 |
| S514-H04 | A2Q8B5 | A0A1E4SVR6 | EFP2BNSMN | EFP6RPZ73 | A3GF74 |
| S514-B06 | A2Q8B5 | A0A1E4SVR6 | EFP2BNSMN | EFP6RPZ73 | Q8X167 |
| S514-C09 | A2Q8B5 | A0A1E4SVR6 | EFP2BNSMN | EFP6RPZ73 | Q8X167 |
| S515-C05 | A2Q8B5 | A0A1E4SVR6 | EFP2BNSMN | EFP6RPZ73 | Q8X167 |
| S515-D05 | A2Q8B5 | A0A1E4SVR6 | EFP2BNSMN | EFP6RPZ73 | Q8X167 |
| S515-H03 | A2Q8B5 | A0A1E4SVR6 | EFP2BNSMN | EFP6RPZ73 | Q8X167 |
| S515-H08 | A2Q8B5 | A0A1E4SVR6 | EFP2BNSMN | EFP6RPZ73 | Q8X167 |
| S516-E01 | A2Q8B5 | A0A1E4SVR6 | EFP2BNSMN | EFP6RPZ73 | Q8X167 |
| S514-D05 | EFP2C7GS0 | A0A1E4SVR6 | EFP2BNSMN | EFP6RPZ73 | A3GF74 |
| S514-C07 | G4N708 | A0A1E4SVR6 | EFP2BNSMN | EFP6RPZ73 | A3GF74 |
| S514-F03 | G4N708 | A0A1E4SVR6 | EFP2BNSMN | EFP6RPZ73 | A3GF74 |
| S515-F10 | G4N708 | A0A1E4SVR6 | EFP2BNSMN | EFP6RPZ73 | A3GF74 |
| S514-E03 | O94735 | A0A1E4SVR6 | EFP2BNSMN | EFP6RPZ73 | A3GF74 |
| S514-E10 | O94735 | A0A1E4SVR6 | EFP2BNSMN | EFP6RPZ73 | A3GF74 |
| S514-H06 | O94735 | A0A1E4SVR6 | EFP2BNSMN | EFP6RPZ73 | A3GF74 |
| S515-B11 | O94735 | A0A1E4SVR6 | EFP2BNSMN | EFP6RPZ73 | A3GF74 |
| S515-C01 | O94735 | A0A1E4SVR6 | EFP2BNSMN | EFP6RPZ73 | A3GF74 |
| S515-G03 | O94735 | A0A1E4SVR6 | EFP2BNSMN | EFP6RPZ73 | A3GF74 |
| S515-G06 | O94735 | A0A1E4SVR6 | EFP2BNSMN | EFP6RPZ73 | A3GF74 |
| S514-C03 | O94735 | A0A1E4SVR6 | EFP2BNSMN | EFP6RPZ73 | Q8X167 |
| S514-H03 | O94735 | A0A1E4SVR6 | EFP2BNSMN | EFP6RPZ73 | Q8X167 |
| S515-E10 | O94735 | A0A1E4SVR6 | EFP2BNSMN | EFP6RPZ73 | Q8X167 |
| S515-F11 | O94735 | A0A1E4SVR6 | EFP2BNSMN | EFP6RPZ73 | Q8X167 |
| S514-F07 | P31867 | A0A1E4SVR6 | EFP2BNSMN | EFP6RPZ73 | A3GF74 |
| S515-H11 | P31867 | A0A1E4SVR6 | EFP2BNSMN | EFP6RPZ73 | A3GF74 |
| S516-D01 | P31867 | A0A1E4SVR6 | EFP2BNSMN | EFP6RPZ73 | A3GF74 |
| S514-G06 | P31867 | A0A1E4SVR6 | EFP2BNSMN | EFP6RPZ73 | Q8X167 |
| S514-G08 | P31867 | A0A1E4SVR6 | EFP2BNSMN | EFP6RPZ73 | Q8X167 |
| S514-H07 | P31867 | A0A1E4SVR6 | EFP2BNSMN | EFP6RPZ73 | Q8X167 |
| S515-D07 | P31867 | A0A1E4SVR6 | EFP2BNSMN | EFP6RPZ73 | Q8X167 |
| S515-D08 | P31867 | A0A1E4SVR6 | EFP2BNSMN | EFP6RPZ73 | Q8X167 |
| S515-E02 | P31867 | A0A1E4SVR6 | EFP2BNSMN | EFP6RPZ73 | Q8X167 |
| S514-G10 | G4N708 | A2QAC0 | EFP2BNSMN | EFP6RPZ73 | A3GF74 |
| S515-A10 | G4N708 | A2QAC0 | EFP2BNSMN | EFP6RPZ73 | A3GF74 |
| S515-A05 | G4N708 | A2QAC0 | EFP2BNSMN | EFP6RPZ73 | Q8X167 |
| S515-H09 | P31867 | A2QAC0 | EFP2BNSMN | EFP6RPZ73 | Q8X167 |
| S516-G01 | O94735 | A5DD67 | EFP2BNSMN | EFP6RPZ73 | A3GF74 |
| S514-H08 | O94735 | A5DD67 | EFP2BNSMN | EFP6RPZ73 | Q8X167 |
| S515-G11 | P31867 | A5DD67 | EFP2BNSMN | EFP6RPZ73 | A3GF74 |
| S514-A04 | O94735 | AAE28701 | EFP2BNSMN | EFP6RPZ73 | A3GF74 |
| S515-F01 | O94735 | AAE28701 | EFP2BNSMN | EFP6RPZ73 | Q8X167 |
| S514-G03 | P31867 | AAE28701 | EFP2BNSMN | EFP6RPZ73 | A3GF74 |
| S514-B08 | A2Q8B5 | B6HI95 | EFP2BNSMN | EFP6RPZ73 | A3GF74 |
| S514-F09 | A2Q8B5 | B6HI95 | EFP2BNSMN | EFP6RPZ73 | A3GF74 |
| S515-B05 | A2Q8B5 | B6HI95 | EFP2BNSMN | EFP6RPZ73 | A3GF74 |
| S515-F09 | EFP2C7GS0 | B6HI95 | EFP2BNSMN | EFP6RPZ73 | A3GF74 |
| S515-E04 | G4N708 | B6HI95 | EFP2BNSMN | EFP6RPZ73 | A3GF74 |
| S516-G03 | O94735 | B6HI95 | EFP2BNSMN | EFP6RPZ73 | A3GF74 |
| S514-G05 | O94735 | B6HI95 | EFP2BNSMN | EFP6RPZ73 | Q8X167 |
| S515-G01 | O94735 | B6HI95 | EFP2BNSMN | EFP6RPZ73 | Q8X167 |
| S515-H07 | P31867 | B6HI95 | EFP2BNSMN | EFP6RPZ73 | A3GF74 |
| S515-A04 | P31867 | B6HI95 | EFP2BNSMN | EFP6RPZ73 | Q8X167 |
| S515-C02 | A2Q8B5 | C5J3R8 | EFP2BNSMN | EFP6RPZ73 | A3GF74 |
| S514-E05 | O94735 | C5J3R8 | EFP2BNSMN | EFP6RPZ73 | Q8X167 |
| S514-G07 | P31867 | C5J3R8 | EFP2BNSMN | EFP6RPZ73 | A3GF74 |
| S515-C11 | P31867 | C5J3R8 | EFP2BNSMN | EFP6RPZ73 | A3GF74 |
| S514-D10 | O94735 | EFP5NRTLP | EFP2BNSMN | EFP6RPZ73 | Q8X167 |
| S514-E04 | EFP2C7GS0 | EFP9CM0L5 | EFP2BNSMN | EFP6RPZ73 | Q8X167 |
| S515-D04 | A2Q8B5 | Q763T4 | EFP2BNSMN | EFP6RPZ73 | A3GF74 |
| S515-E08 | A2Q8B5 | Q763T4 | EFP2BNSMN | EFP6RPZ73 | A3GF74 |
| S516-D03 | A2Q8B5 | Q763T4 | EFP2BNSMN | EFP6RPZ73 | A3GF74 |
| S516-E03 | A2Q8B5 | Q763T4 | EFP2BNSMN | EFP6RPZ73 | A3GF74 |
| S516-H01 | A2Q8B5 | Q763T4 | EFP2BNSMN | EFP6RPZ73 | A3GF74 |
| S514-H11 | A2Q8B5 | Q763T4 | EFP2BNSMN | EFP6RPZ73 | Q8X167 |
| S516-E02 | EFP2C7GS0 | Q763T4 | EFP2BNSMN | EFP6RPZ73 | Q8X167 |
| S515-G04 | G4N708 | Q763T4 | EFP2BNSMN | EFP6RPZ73 | A3GF74 |
| S514-A07 | O94735 | Q763T4 | EFP2BNSMN | EFP6RPZ73 | A3GF74 |
| S515-H10 | O94735 | Q763T4 | EFP2BNSMN | EFP6RPZ73 | Q8X167 |
| S514-B11 | P31867 | Q763T4 | EFP2BNSMN | EFP6RPZ73 | Q8X167 |
| S515-C03 | A2Q8B5 | Q7SI09 | EFP2BNSMN | EFP6RPZ73 | A3GF74 |
| S516-B01 | A2Q8B5 | Q7SI09 | EFP2BNSMN | EFP6RPZ73 | A3GF74 |
| S514-D04 | A2Q8B5 | Q7SI09 | EFP2BNSMN | EFP6RPZ73 | Q8X167 |
| S514-H10 | A2Q8B5 | Q7SI09 | EFP2BNSMN | EFP6RPZ73 | Q8X167 |
| S515-A08 | A2Q8B5 | Q7SI09 | EFP2BNSMN | EFP6RPZ73 | Q8X167 |
| S515-C07 | A2Q8B5 | Q7SI09 | EFP2BNSMN | EFP6RPZ73 | Q8X167 |
| S515-E01 | EFP2C7GS0 | Q7SI09 | EFP2BNSMN | EFP6RPZ73 | Q8X167 |
| S514-F11 | O94735 | Q7SI09 | EFP2BNSMN | EFP6RPZ73 | Q8X167 |
| S514-B04 | P31867 | Q7SI09 | EFP2BNSMN | EFP6RPZ73 | A3GF74 |
| S515-F08 | A2Q8B5 | Q96V44 | EFP2BNSMN | EFP6RPZ73 | A3GF74 |
| S516-G02 | A2Q8B5 | Q96V44 | EFP2BNSMN | EFP6RPZ73 | A3GF74 |
| S514-F08 | G4N708 | Q96V44 | EFP2BNSMN | EFP6RPZ73 | A3GF74 |
| S515-D06 | O94735 | Q96V44 | EFP2BNSMN | EFP6RPZ73 | A3GF74 |
| S515-H01 | O94735 | Q96V44 | EFP2BNSMN | EFP6RPZ73 | A3GF74 |
| S514-A08 | O94735 | Q96V44 | EFP2BNSMN | EFP6RPZ73 | Q8X167 |
| S514-C10 | O94735 | Q96V44 | EFP2BNSMN | EFP6RPZ73 | Q8X167 |
| S512-G04 | A2Q8B5 | A0A1E4SVR6 | EFP3RCJ9K | EFP6RPZ73 | Q8X167 |
| S512-G09 | A2Q8B5 | A0A1E4SVR6 | EFP3RCJ9K | EFP6RPZ73 | Q8X167 |
| S512-H01 | A2Q8B5 | A0A1E4SVR6 | EFP3RCJ9K | EFP6RPZ73 | Q8X167 |
| S512-G02 | O94735 | A0A1E4SVR6 | EFP3RCJ9K | EFP6RPZ73 | A3GF74 |
| S512-F09 | O94735 | A0A1E4SVR6 | EFP3RCJ9K | EFP6RPZ73 | Q8X167 |
| S512-G03 | P31867 | A0A1E4SVR6 | EFP3RCJ9K | EFP6RPZ73 | Q8X167 |
| S512-G01 | O94735 | A2QAC0 | EFP3RCJ9K | EFP6RPZ73 | A3GF74 |
| S512-F04 | P31867 | A2QAC0 | EFP3RCJ9K | EFP6RPZ73 | A3GF74 |
| S512-G05 | P31867 | A2QAC0 | EFP3RCJ9K | EFP6RPZ73 | Q8X167 |
| S512-H03 | P31867 | A2QAC0 | EFP3RCJ9K | EFP6RPZ73 | Q8X167 |
| S511-H03 | A2Q8B5 | B6HI95 | EFP3RCJ9K | EFP6RPZ73 | Q8X167 |
| S512-C01 | O94735 | B6HI95 | EFP3RCJ9K | EFP6RPZ73 | Q8X167 |
| S512-F06 | A2Q8B5 | Q763T4 | EFP3RCJ9K | EFP6RPZ73 | A3GF74 |
| S511-C01 | A2Q8B5 | Q763T4 | EFP3RCJ9K | EFP6RPZ73 | Q8X167 |
| S512-F05 | A2Q8B5 | Q763T4 | EFP3RCJ9K | EFP6RPZ73 | Q8X167 |
| S512-H06 | O94735 | Q7SI09 | EFP3RCJ9K | EFP6RPZ73 | Q8X167 |
| S512-G08 | P31867 | Q7SI09 | EFP3RCJ9K | EFP6RPZ73 | Q8X167 |
| S511-G01 | O94735 | Q96V44 | EFP3RCJ9K | EFP6RPZ73 | A3GF74 |
| S513-F08 | A2Q8B5 | A0A1E4SVR6 | EFP7G1BZ1 | EFP6RPZ73 | A3GF74 |
| S513-H04 | A2Q8B5 | A0A1E4SVR6 | EFP7G1BZ1 | EFP6RPZ73 | A3GF74 |
| S514-C01 | A2Q8B5 | A0A1E4SVR6 | EFP7G1BZ1 | EFP6RPZ73 | Q8X167 |
| S512-G10 | EFP2C7GS0 | A0A1E4SVR6 | EFP7G1BZ1 | EFP6RPZ73 | A3GF74 |
| S513-C11 | EFP2C7GS0 | A0A1E4SVR6 | EFP7G1BZ1 | EFP6RPZ73 | Q8X167 |
| S513-B06 | G4N708 | A0A1E4SVR6 | EFP7G1BZ1 | EFP6RPZ73 | A3GF74 |
| S513-F01 | G4N708 | A0A1E4SVR6 | EFP7G1BZ1 | EFP6RPZ73 | Q8X167 |
| S513-F03 | O94735 | A0A1E4SVR6 | EFP7G1BZ1 | EFP6RPZ73 | A3GF74 |
| S513-G01 | O94735 | A0A1E4SVR6 | EFP7G1BZ1 | EFP6RPZ73 | A3GF74 |
| S513-G02 | O94735 | A0A1E4SVR6 | EFP7G1BZ1 | EFP6RPZ73 | A3GF74 |
| S513-G09 | O94735 | A0A1E4SVR6 | EFP7G1BZ1 | EFP6RPZ73 | A3GF74 |
| S513-H02 | O94735 | A0A1E4SVR6 | EFP7G1BZ1 | EFP6RPZ73 | A3GF74 |
| S513-A01 | O94735 | A0A1E4SVR6 | EFP7G1BZ1 | EFP6RPZ73 | Q8X167 |
| S513-C03 | O94735 | A0A1E4SVR6 | EFP7G1BZ1 | EFP6RPZ73 | Q8X167 |
| S513-D03 | O94735 | A0A1E4SVR6 | EFP7G1BZ1 | EFP6RPZ73 | Q8X167 |
| S514-B01 | O94735 | A0A1E4SVR6 | EFP7G1BZ1 | EFP6RPZ73 | Q8X167 |
| S514-D01 | P31867 | A0A1E4SVR6 | EFP7G1BZ1 | EFP6RPZ73 | A3GF74 |
| S513-G03 | A2Q8B5 | A2QAC0 | EFP7G1BZ1 | EFP6RPZ73 | Q8X167 |
| S513-D02 | O94735 | A2QAC0 | EFP7G1BZ1 | EFP6RPZ73 | A3GF74 |
| S512-C10 | O94735 | A2QAC0 | EFP7G1BZ1 | EFP6RPZ73 | Q8X167 |
| S513-F07 | O94735 | A2QAC0 | EFP7G1BZ1 | EFP6RPZ73 | Q8X167 |
| S513-F09 | O94735 | A2QAC0 | EFP7G1BZ1 | EFP6RPZ73 | Q8X167 |
| S513-F06 | A2Q8B5 | A5DD67 | EFP7G1BZ1 | EFP6RPZ73 | A3GF74 |
| S513-B05 | G4N708 | A5DD67 | EFP7G1BZ1 | EFP6RPZ73 | A3GF74 |
| S513-B07 | O94735 | A5DD67 | EFP7G1BZ1 | EFP6RPZ73 | Q8X167 |
| S513-E01 | O94735 | A5DD67 | EFP7G1BZ1 | EFP6RPZ73 | Q8X167 |
| S513-G06 | A2Q8B5 | AAE28701 | EFP7G1BZ1 | EFP6RPZ73 | A3GF74 |
| S513-A05 | A2Q8B5 | AAE28701 | EFP7G1BZ1 | EFP6RPZ73 | Q8X167 |
| S513-A04 | EFP2C7GS0 | AAE28701 | EFP7G1BZ1 | EFP6RPZ73 | Q8X167 |
| S513-A02 | A2Q8B5 | B6HI95 | EFP7G1BZ1 | EFP6RPZ73 | Q8X167 |
| S513-E06 | G4N708 | B6HI95 | EFP7G1BZ1 | EFP6RPZ73 | Q8X167 |
| S513-A03 | O94735 | B6HI95 | EFP7G1BZ1 | EFP6RPZ73 | Q8X167 |
| S513-C09 | O94735 | B6HI95 | EFP7G1BZ1 | EFP6RPZ73 | Q8X167 |
| S513-E04 | O94735 | B6HI95 | EFP7G1BZ1 | EFP6RPZ73 | Q8X167 |
| S513-F04 | O94735 | B6HI95 | EFP7G1BZ1 | EFP6RPZ73 | Q8X167 |
| S513-D05 | P31867 | B6HI95 | EFP7G1BZ1 | EFP6RPZ73 | A3GF74 |
| S513-C10 | P31867 | B6HI95 | EFP7G1BZ1 | EFP6RPZ73 | Q8X167 |
| S513-D09 | G4N708 | C5J3R8 | EFP7G1BZ1 | EFP6RPZ73 | Q8X167 |
| S513-C02 | O94735 | C5J3R8 | EFP7G1BZ1 | EFP6RPZ73 | A3GF74 |
| S513-G10 | O94735 | C5J3R8 | EFP7G1BZ1 | EFP6RPZ73 | A3GF74 |
| S513-H05 | O94735 | C5J3R8 | EFP7G1BZ1 | EFP6RPZ73 | Q8X167 |
| S514-E01 | O94735 | Q763T4 | EFP7G1BZ1 | EFP6RPZ73 | Q8X167 |
| S513-E11 | P31867 | Q763T4 | EFP7G1BZ1 | EFP6RPZ73 | Q8X167 |
| S513-H11 | P31867 | Q763T4 | EFP7G1BZ1 | EFP6RPZ73 | Q8X167 |
| S513-A11 | G4N708 | Q7SI09 | EFP7G1BZ1 | EFP6RPZ73 | A3GF74 |
| S512-F10 | A2Q8B5 | Q96V44 | EFP7G1BZ1 | EFP6RPZ73 | A3GF74 |
| S513-H06 | A2Q8B5 | Q96V44 | EFP7G1BZ1 | EFP6RPZ73 | Q8X167 |
| S513-B01 | O94735 | Q96V44 | EFP7G1BZ1 | EFP6RPZ73 | Q8X167 |
| S509-C08 | O94735 | A0A1E4SVR6 | G3YG17 | EFP6RPZ73 | A3GF74 |
| S509-A09 | O94735 | A0A1E4SVR6 | G3YG17 | EFP6RPZ73 | Q8X167 |
| S509-E10 | O94735 | A0A1E4SVR6 | G3YG17 | EFP6RPZ73 | Q8X167 |
| S510-H02 | O94735 | A2QAC0 | G3YG17 | EFP6RPZ73 | A3GF74 |
| S509-G08 | A2Q8B5 | B6HI95 | G3YG17 | EFP6RPZ73 | Q8X167 |
| S509-G10 | EFP2C7GS0 | B6HI95 | G3YG17 | EFP6RPZ73 | A3GF74 |
| S509-C06 | P31867 | Q763T4 | G3YG17 | EFP6RPZ73 | A3GF74 |
| S509-H10 | P31867 | Q763T4 | G3YG17 | EFP6RPZ73 | Q8X167 |
| S509-A08 | O94735 | Q7SI09 | G3YG17 | EFP6RPZ73 | A3GF74 |
| S509-D07 | O94735 | Q7SI09 | G3YG17 | EFP6RPZ73 | A3GF74 |
| S509-H09 | O94735 | Q7SI09 | G3YG17 | EFP6RPZ73 | A3GF74 |
| S509-G05 | A2Q8B5 | Q96V44 | G3YG17 | EFP6RPZ73 | A3GF74 |

[0783] Table 13 shows a summary of strain growth on arabinose agar plates which was dependent on LXR selection. Those strains with no growth are indicated with (−); stains with minimal growth are indicated with (+/−); stains with the best growth are indicated with (+). Strains with the best growth had expressed an LXR from Aspergillus brasiliensis (SEQ ID NO: 297), Talaromyces leycettanus (SEQ ID NO: 300), Aspergillus aculeatus (SEQ ID NO: 302) or Aspergillus niger (SEQ ID NO: 304), while the strains expressing the remaining LXRs showed only minimal or no growth.

TABLE 13
Arabinose strain growth summary

| | | | Growth agar |
|---|---|---|---|
| LXR | Gene ID | Organism | screening |
| 1 | A0A1E4T269 | C. arabinofermentans | − |
| 2 | E7R859 | O. parapolymorpha | − |
| 3 | Q8NK50 | T. reesei | − |
| 4 | Q70FD1 | A. monospora | +/− |
| 5 | G3YG17 | A. niger | + |
| 6 | EFP3RCJ9K | T. leycettanus | + |
| 7 | EFP5PTNSX | C. sorboxylosa | − |
| 8 | EFP7G1BZ1 | A. brasiliensis | + |
| 9 | EFP16N8ZZ | P. membranifaciens | − |
| 10 | EFP480208 | B. anomalus | − |
| 11 | EFP2CH8R5 | K. capsulata | +/− |
| 12 | EFP2BNSMN | A. aculeatus | + |

### Example 2: Evaluation of Yeast Strains Expressing an Active Arabinose Fermentation Pathway

[0784] Yeast strains from Example 1 showing substantial growth (ie those expressing the LXR from, A. brasiliensis, T. leycettanus, A. aculeatus and A. niger) were further evaluated for growth in media where xylose or arabinose were the sole carbon source. The Growth Profiler (Enzyscreen; Heemstede, Netherlands) was used to evaluate strain growth. The Growth Profiler is an incubator that can simultaneously control growth conditions, take images of clear-bottom multi-titer growth plates, and measure cell density over time. A software converts pixels of defined regions per well of each image to RBG (red, blue, green) values; green values are translated to identify growth rates for analysis.

[0785] To prepare the strains for evaluation of growth in YNB+2% arabinose or xylose media, yeast strains were grown for 24 hours in YPD medium with 2% glucose, 30° C. and 300 RPM. Yeast cells are centrifuged at 3000 RPM for 10 minutes to pellet the cells. The YPD medium was removed and yeast cells were resuspended in YNB medium. An inoculum of yeast was added to Growth Profiler plates containing 250 uL of medium (YNB with 3% arabinose or 3% xylose). Plates are secured in the Growth Profiler and grown at 250 RPM, 30° C. for 72 hours. Time intervals between each photo was 10 minutes. Growth evaluation was stopped by adding and mixing 50 uL of 8% H₂SO₄. Samples were centrifuged at 3000 RPM for 10 minutes and the supernatant was collected for HPLC analysis for remaining arabinose and xylose concentrations. Slope of each strain was calculated by taking the ratio of rise (green value) over run (time (hours)) during exponential phase. Strains with the highest slopes were able to grow best in the media and those with the least amount of remaining arabinose or xylose consumed the most C5 sugar. Results are shown in Table 14.

TABLE 14

| | Arabinose | | Xylose | |
|---|---|---|---|---|
| | Slope | ARABINOSE | Slope | XYLOSE |
| Strain ID | (G-value/h) | (g/L) | (G-value/h) | (g/L) |
| ER | 0 | 21.50165714 | 0.225084148 | 20.82 |
| S514-C11 | 0.223891 | — | 2.920503 | 8.82 |
| S514-H04 | 0.304674 | 18.2592 | 3.033948 | 7.2 |
| S514-B06 | 0.301397 | 19.971 | 2.950927 | 7.98 |
| S514-C09 | 0.306953 | 20.922 | 2.836496 | 8.16 |
| S515-C05 | 0.26819 | 20.288 | 3.044113 | 9.06 |
| S515-D05 | 0.167696 | 24.9162 | 3.009615 | 8.88 |
| S515-H03 | 0.375604 | 18.8298 | 3.008567 | 10.68 |
| S515-H08 | 0.491814 | 15.9134 | 2.831306 | 8.88 |
| S516-E01 | 0.347358 | 16.9912 | 3.03406 | 10.38 |
| S514-D05 | 0.097607 | 27.0718 | 1.098669 | 12.6 |
| S514-C07 | 0.281654 | 22.19 | 2.387774 | 8.28 |
| S514-F03 | 0.235715 | 24.2822 | 2.581191 | 9.48 |
| S515-F10 | 0.281892 | 20.7952 | 2.834035 | 9.72 |
| S514-E03 | 0.256387 | 22.4436 | 2.04905 | 9.42 |
| S514-E10 | 0.193412 | — | 2.163497 | 10.5 |
| S514-H06 | 0.312106 | 21.6194 | 2.095047 | 8.7 |
| S515-B11 | 0.35427 | 21.4926 | 2.112324 | 10.02 |
| S515-C01 | 0.389105 | 17.3716 | 2.78317 | 8.94 |
| S515-G03 | 0.286616 | 11.2852 | 2.17861 | 10.44 |
| S515-G06 | 0.293631 | 22.5704 | 2.016283 | 10.8 |
| S514-C03 | 0.306685 | 21.239 | 2.08522 | 10.02 |
| S514-H03 | −0.05382 | 29.4176 | 2.144722 | 8.22 |
| S515-E10 | 0.233547 | 23.0142 | 2.192073 | 10.56 |
| S515-F11 | 0.286131 | 21.6194 | 2.146729 | 10.14 |
| S514-F07 | 0.227929 | — | 1.74774 | 9.6 |
| S515-H11 | 0.285432 | 27.1986 | 1.926555 | 10.98 |
| S516-D01 | 0.494728 | 14.9624 | 2.783655 | 11.94 |
| S514-G06 | 0.202736 | 26.6914 | 1.724565 | 9.36 |
| S514-G08 | 0.238605 | 26.6914 | 1.777348 | 9.48 |
| S514-H07 | 0.159451 | 26.945 | 1.798484 | 9.12 |
| S515-D07 | 0.247574 | 26.0574 | 1.768388 | 10.98 |
| S515-D08 | 0.229732 | 26.5646 | 1.744443 | 10.08 |
| S515-E02 | 0.147991 | 26.628 | 1.880161 | 11.88 |
| S514-G10 | 0.312388 | — | 2.767305 | 10.32 |
| S515-A10 | 0.184697 | 27.5156 | 0.918563 | 14.52 |
| S515-A05 | 0.223526 | 26.5012 | 2.475423 | 10.2 |
| S515-H09 | 0.294529 | 23.6482 | 1.800561 | 10.98 |
| S516-G01 | −0.14328 | 29.9882 | 2.137557 | 10.38 |
| S514-H08 | −0.09944 | 29.2908 | 2.111554 | 8.82 |
| S515-G11 | −0.05439 | 29.8614 | 1.731366 | 10.92 |
| S514-A04 | −0.00984 | 23.5214 | 2.882125 | 5.58 |
| S515-F01 | 0.087493 | 22.824 | 2.824389 | 3.3 |
| S514-G03 | 0.014717 | 29.1006 | 1.644223 | 9.96 |
| S514-B08 | 0.478402 | 18.386 | 3.074911 | 7.74 |
| S514-F09 | 0.437208 | — | 2.926999 | 8.52 |
| S515-B05 | 0.523905 | 16.3572 | 3.133496 | 9.24 |
| S515-F09 | 0.412795 | 18.069 | 2.964951 | 9.24 |
| S515-E04 | 0.350307 | 17.1814 | 2.332287 | 8.88 |
| S516-G03 | 0.593214 | 16.2304 | 2.100655 | 10.86 |
| S514-G05 | 0.368751 | 17.6886 | 2.107803 | 8.7 |
| S515-G01 | 0.746399 | 14.5186 | 2.131169 | 10.86 |
| S515-H07 | 0.3148 | 22.1266 | 1.657816 | 10.86 |
| S515-A04 | 0.257812 | 21.8096 | 1.504137 | 12.24 |
| S515-C02 | 0.174764 | 24.1554 | 2.946572 | 9.48 |
| S514-E05 | 0.186016 | 24.726 | 2.081061 | 8.64 |
| S514-G07 | 0.166103 | 26.5012 | 1.734104 | 9.06 |
| S515-C11 | 0.256103 | 27.1986 | 1.477412 | 11.52 |
| S514-D10 | 0.359205 | — | 1.975 | 9.66 |
| S514-E04 | 0.571672 | 8.6224 | 2.89671 | 6.48 |
| S515-D04 | 0.551086 | 14.5186 | 3.005247 | 9 |
| S515-E08 | 0.551203 | 15.4696 | 3.067895 | 9.12 |
| S516-D03 | 0.586343 | 14.1382 | 3.051999 | 9.18 |
| S516-E03 | 0.636337 | 14.899 | 3.102168 | 9.84 |
| S516-H01 | 0.865365 | 13.1238 | 2.995912 | 9.18 |
| S514-H11 | 0.728317 | — | 2.929325 | 9.66 |
| S516-E02 | 0.703683 | 14.6454 | 2.979273 | 9.78 |
| S515-G04 | 1.042094 | 4.5014 | 2.775628 | 4.44 |
| S514-A07 | 0.496838 | 16.0402 | 1.932455 | 8.82 |
| S515-H10 | 0.759813 | 13.6944 | 2.627836 | 10.5 |
| S514-B11 | 0.17521 | | 1.667005 | 11.7 |
| S515-C03 | 0.401786 | 16.0402 | 3.069054 | 9.54 |
| S516-B01 | 0.707663 | 13.0604 | 2.772564 | 10.62 |
| S514-D04 | 0.355574 | — | 2.824911 | 7.92 |
| S514-H10 | 0.604883 | — | 2.973979 | 9.48 |
| S515-A08 | 0.530153 | 15.4062 | 2.90886 | 9.48 |
| S515-C07 | 0.586035 | 14.6454 | 3.150673 | 9.12 |
| S515-E01 | 0.649326 | 15.9768 | 2.743048 | 9.72 |
| S514-F11 | 0.396738 | — | 2.183791 | 9.48 |
| S514-B04 | 0.239392 | 23.2678 | 1.696266 | 9.42 |
| S515-F08 | 0.361978 | 20.8586 | 2.951987 | 9.06 |
| S516-G02 | 0.852543 | 13.0604 | 2.915959 | 9.72 |
| S514-F08 | 0.431982 | 17.5618 | 2.602745 | 7.98 |
| S515-D06 | 1.053344 | 9.1296 | 2.697061 | 9.96 |
| S515-H01 | 0.778018 | 14.8356 | 2.029516 | 10.5 |
| S514-A08 | 0.357256 | 16.5474 | 2.043049 | 8.7 |
| S514-C10 | 0.417053 | — | 1.996473 | 10.74 |
| S512-G04 | 0.443779 | 15.5964 | 3.17579 | 10.92 |
| S512-G09 | 0.406462 | 20.4782 | 2.909094 | 10.68 |
| S512-H01 | 0.541342 | 15.3428 | 3.025252 | 10.86 |
| S512-G02 | −0.01276 | 25.2332 | 2.579761 | 12.96 |
| S512-F09 | 0.384775 | 19.2736 | 2.359821 | 11.94 |
| S512-G03 | 0.283375 | 19.0834 | 1.893099 | 12.96 |
| S512-G01 | 0.793687 | 14.1382 | 2.480385 | 12.84 |
| S512-F04 | 0.481863 | 18.8932 | 2.187117 | 13.32 |
| S512-G05 | 0.345186 | 23.458 | 1.865619 | 12.24 |
| S512-H03 | 0.437481 | 20.1612 | 1.937234 | 13.68 |
| S511-H03 | 0.709499 | 15.85 | 3.287925 | 11.46 |
| S512-C01 | 0.665902 | 17.435 | 2.239868 | 13.08 |
| S512-F06 | 0.757808 | 11.8558 | 2.978545 | 10.92 |
| S511-C01 | 0.725895 | 18.1958 | 3.251609 | 10.14 |
| S512-F05 | 0.669105 | 15.4062 | 3.036416 | 10.38 |
| S512-H06 | 0.699211 | 14.1382 | 2.578299 | 13.08 |
| S512-G08 | 0.469355 | 19.337 | 1.917905 | 12.96 |
| S511-G01 | 0.761954 | 15.9768 | 2.38626 | 11.94 |
| S513-F08 | 0.349422 | 18.4494 | 3.227536 | 8.1 |
| S513-H04 | 0.342447 | 15.9768 | 3.175577 | 7.86 |
| S514-C01 | 0.339727 | 17.118 | 2.902037 | 7.62 |
| S512-G10 | 0.386734 | 14.4552 | 3.027752 | 9.78 |
| S513-C11 | 0.451742 | 13.948 | 2.79311 | 7.44 |
| S513-B06 | 0.279008 | 19.5906 | 2.686594 | 10.26 |
| S513-F01 | 0.349223 | 17.9422 | 2.874943 | 10.32 |
| S513-F03 | 0.322046 | 17.752 | 2.221799 | 10.5 |
| S513-G01 | 0.404345 | 20.4148 | 2.636006 | 10.5 |
| S513-G02 | 0.291819 | 22.6338 | 2.356212 | 9.9 |
| S513-G09 | 0.344041 | 18.703 | 2.328688 | 9.3 |
| S513-H02 | 0.40363 | 17.118 | 2.282683 | 9.48 |
| S513-A01 | 0.405526 | 18.069 | 2.087484 | 18.96 |
| S513-C03 | 0.252879 | 18.1958 | 2.229841 | 9.84 |
| S513-D03 | 0.205545 | 20.0978 | 1.918364 | 10.32 |
| S514-B01 | 0.381516 | 17.0546 | 2.030427 | 8.28 |
| S514-D01 | 0.28958 | 23.3312 | 1.822026 | 8.82 |
| S513-G03 | 0.689008 | 10.3976 | 2.989736 | 7.92 |
| S513-D02 | 0.687881 | 11.412 | 2.211079 | 9.36 |
| S512-C10 | 1.082383 | 4.3112 | 2.934386 | 10.86 |
| S513-F07 | 0.632769 | 11.5388 | 2.080188 | 9.36 |
| S513-F09 | 0.647857 | 12.2362 | 2.14045 | 9.3 |
| S513-F06 | −0.20326 | 28.0228 | 3.111995 | 7.98 |
| S513-B05 | −0.03917 | 28.4666 | 1.629285 | 9.12 |
| S513-B07 | −0.19577 | 28.53 | 2.063536 | 9.3 |
| S513-E01 | −0.1048 | 28.53 | 2.114326 | 11.04 |
| S513-G06 | −0.16182 | 28.847 | 2.728601 | 7.44 |
| S513-A05 | −0.04623 | 28.9738 | 2.935447 | 7.62 |
| S513-A04 | −0.1041 | 29.1006 | 3.04918 | 7.62 |
| S513-A02 | 0.823808 | 8.876 | 3.188441 | 9.66 |
| S513-E06 | 0.56613 | 12.6166 | 2.802197 | 9.12 |
| S513-A03 | 0.710229 | 9.51 | 2.055643 | 9.54 |
| S513-C09 | 0.645218 | 7.925 | 2.129339 | 9.42 |
| S513-E04 | 0.756633 | 10.9682 | 2.090318 | 9.42 |
| S513-F04 | 0.865162 | 9.6368 | 2.503446 | 9.42 |
| S513-D05 | 1.136577 | 5.389 | 3.253874 | 6.66 |
| S513-C10 | 0.267478 | 19.8442 | 1.552885 | 10.38 |
| S513-D09 | 0.160144 | 25.1064 | 2.721037 | 10.14 |
| S513-C02 | 0.268511 | 19.4004 | 2.539023 | 12.06 |
| S513-G10 | 0.176039 | 24.8528 | 2.471286 | 9.06 |
| S513-H05 | 0.204994 | 24.409 | 2.157022 | 9.42 |
| S514-E01 | 0.807711 | 10.0172 | 2.104705 | 8.88 |
| S513-E11 | 0.299618 | 19.7808 | 2.001606 | 10.14 |
| S513-H11 | 0.570877 | 16.2938 | 2.201135 | 9.12 |
| S513-A11 | 0.630132 | 7.4178 | 2.778518 | 8.64 |
| S512-F10 | 0.930637 | 3.9942 | 2.936537 | 10.2 |
| S513-H06 | 0.883345 | 10.3976 | 3.020215 | 7.44 |
| S513-B01 | 0.88628 | 11.9826 | 2.158865 | 10.26 |
| S509-C08 | 0.562551 | 1.7118 | 2.135135 | 10.86 |
| S509-A09 | 0.522801 | 8.7492 | 1.933366 | 11.88 |
| S509-E10 | 0.540302 | 1.7118 | 2.03875 | 10.62 |
| S510-H02 | 0.835795 | 10.9048 | 2.251637 | 11.7 |
| S509-G08 | 0.995938 | 6.8472 | 3.134697 | 9.48 |
| S509-G10 | 0.833948 | 1.3314 | 3.023345 | 8.16 |
| S509-C06 | 0.637888 | 13.2506 | 1.688989 | 11.52 |
| S509-H10 | 0.749673 | 13.3774 | 1.763998 | 12.3 |
| S509-A08 | 0.70811 | 1.0778 | 2.380411 | 10.44 |
| S509-D07 | 0.967568 | 8.0518 | 2.183393 | 10.44 |
| S509-H09 | 0.793033 | 1.1412 | 2.222569 | 10.86 |
| S509-G05 | 0.891624 | 6.4668 | 3.064 | 8.64 |

### Example 3: Construction of Yeast Strains Expressing an Active Arabinose Fermentation Pathway with Heterologous Cones AR, LAD, and LXR

[0786] This example describes the construction of yeast cells containing an active arabinose pathway by heterologous expression of only AR, LAD, and LXR. Seven pieces of DNA containing the three heterologous genes (AR, LAD, and LXR) with a promoter and terminator each were designed to allow for homologous recombination between the seven DNA fragments into the XII-5 or XII-2 locus of the yeast MBG4779. The genes for each AR, LAD, and LXR tested in this example have been identified in the examples above to function in yeast strains also expressing XDH and XK. In this example additional copies of XDH and XK were not introduced into the yeast strain.

### Construction of the 5′ Homology and Promoter PGK1 Containing Fragment (Fragment 1)

[0787] Two different DNA fragments were designed for fragment 1, one for targeting to the XII-5 site and one for targeting to the XII-2 site. Synthetic linear uncloned DNA containing 379 bp homology to the XII-5 site or 500 bps homology to the XII-2 site and S. cerevisiae promoter PGK1 was synthesized by Thermo Fisher Scientific and designated 18AAQSYW (XII-5) or 18AAQSZW (XII-2). 18AAQSYW (XII-5) was PCR amplified resulting in an 1100 bps linear DNA fragment used for transformation. 18AAQSZW (XII-2) was PCR amplified resulting in a 1200 bp linear DNA fragment used for transformation.

### Construction of Fragment Containing Aldose Reductase (AR) Coding Sequence (Fragment 2)

[0788] Fragment 2 was constructed to contain 50 bp of the 3′ S. cerevisiae promoter PGK1, a aldose reductase (AR) coding sequence, and 50 bp of the 5′ ADH3 terminator. Five DNA fragments were used, each containing a different aldose reductase coding sequence. The DNA sources of three of the AR fragments were plasmids constructed as described supra (pMcTS498-500), one uncloned synthetic linear DNA from GeneArt (16ACZYMP), and one genomic DNA (S515-G04). To generate linear DNA for transformation pMcTs498, pMcTs499, pMcTs500, 16ACZYMP, or genomic DNA from S515-G04 were used as a PCR template.

### Construction of ADH3 Terminator and PMA1 Promoter Fragment (Fragment 3)

[0789] Fragment 3 was constructed to contain a S. cerevisiae ADH3 terminator and S. cerevisiae PMA1 promoter using methods similar to those described above.

### Construction of Fragment Containing an L-Xylulose Reductase (LXR) Coding Sequence (Fragment 4)

[0790] Fragment 4 was constructed to contain a 50 bp 3′ S. cerevisiae PMA1 promoter, a L-xylulose reductase (LXR)_coding sequence, and 50 bp 5′ S. cerevisiae STE2 terminator. Five DNA fragments total were used for fragment 4 each containing a different L-xylulose reductase coding sequence. The DNA sources for three of the LXR genes are genomic DNA from strains constructed supra (S15-G04, S511-B03, and S513-B01), one is plasmid (pMcTs507), and one is cloned synthetic DNA from GeneArt (18ABYHTC). To generate linear DNA for transformation, pMcTs507, 18ABYHTC, or genomic DNA from S15-G04, S511-B03, or S513-B01 were used as PCR template.

### Construction of the STE2 Terminator and TEF2 Promoter Fragment (Fragment 5)

[0791] Synthetic cloned DNA containing S. cerevisiae STE2 terminator and TEF2 promoter was synthesized by Thermo Fisher Scientific, designated 18ABYHUC, and used as a PCR template to generate a linear DNA for transformation.

### Construction of Fragment Containing an L-Arabinitol 4-Dehydrogenase (LAD) Coding Sequence (Fragment 6)

[0792] Fragment 6 was constructed to contain a 50 bp 3′ S. cerevisiae TEF2 promoter, a L-arabinitol 4-dehydrogenase (LAD) coding sequence, and 50 bp 5′ S. cerevisiae PRM9 terminator. Five DNA fragments total were used for fragment 6 each containing a different L-arabinitol 4-dehydrogenase coding sequence. The DNA sources for four of the LAD genes are genomic DNA from strains constructed supra (S511-B03, S15-G04, S511-A07, and S513-B01) and one is plasmid constructed (pMcTs505). To generate linear DNA for transformation, pMcTs505 or genomic DNA from S511-B03, S15-G04, S511-A07, or S513-B01 were used as a PCR template.

### Construction of the PRM9 Terminator and 3′ Homology Containing Fragment (Fragment 7)

[0793] Two different DNA fragments were designed for fragment 7, one for targeting to the XII-5 site and one for targeting to the XII-2 site. Synthetic linear uncloned DNA containing the S. cerevisiae PMR9 terminator and 400 bp homology to the XII-5 site or 481 bps homology to the XII-2 was synthesized by Thermo Fisher Scientific and designated 18ACTCAP (XII-5) or 18AAQS2W (XII-2). 18ACTCAP (XII-5) and 18AAQS2W (XII-2) were PCR amplified resulting in 650 bp and 730 bp linear DNA fragments, respectively.

Integration of the Linear Fragments to Generate a Yeast with Coding Sequences for Heterologous AR, LAD, and LXR

[0794] The yeast MBG4779 was transformed with the fragments described above with two different pools of DNA fragments. Pool 1: fragments 1, 3, 5, and 7 were constant, where fragments 1 and 7 used DNA fragments with homology to XII-5. Fragments 2, 4, and 6 were pools of the 5 different coding sequences for AR, LXR, or LAD. Pool 2: fragments 1, 3, 5, and 7 were constant, where fragments 1 and 7 used DNA fragments with homology to XII-2. Fragments 2, 4, and 6 were pools of the 5 different coding sequences for AR, LXR, or LAD. Pool 1 targets the DNA fragments to the XII-5 locus and Pool 2 targets the DNA fragments to the XII-2 locus. To aid homologous recombination of the 7 fragments at the genomic sites XII-5 or XII-2 a plasmid containing the nuclease MAD7 and a guide RNA specific to XII-5 (pMLBA635; FIG. 5) or guide RNA specific to XII-2 (pMLBA638; FIG. 6) was also used in the transformation. Pool 1+pMLBA635 or Pool 2+pMLBA638 were transformed into the into the S. cerevisiae strain MBG4779 following yeast electroporation. Transformants were selected on YPD+cloNAT to select for colonies that contain the CRISPR/MAD7 plasmid pMLBA635 or pMLBA638. 320 transformants targeting to XII-5 or XII-2 were picked using a Q-pix Colony Picking System (Molecular Devices) into YPD (2% glucose)+cloNAT liquid 96-well plates. Plates were grown for 2 days at 30° C., 300 rpm. The Q-pix Colony Picking System (Molecular Devices) system was used to make daughter plates in YPD (2% glucose) liquid 96-well plates. Plates were grown for 3 days at 30° C., 300 rpm. The daughter plates were used to inoculate OmniTrays containing YPD (2% glucose) solid medium. The YPD solid plates were used as a starting culture to inoculate OnmiTrays containing YNB with 2% arabinose as the sole carbon source. 74.2% (475/640) grew on YNB with 2% arabinose as the sole carbon source. Integration of the 3-gene cassette was verified by PCR with locus specific primers and subsequent sequencing. Of the 640 sequenced strains, 243 yielded one gene called for AR, LAD, and LXR in each strain.

[0795] In this example 106 of the 125 possible 3-gene expression cassettes were obtained (Table 15), demonstrating growth on YNB+2% arabinose is capable with the only AR, LAD, and LXR.

TABLE 15

| Strain ID | LAD | LXR | AR |
|---|---|---|---|
| S606-A01 | Q763T4 | G3YG17 | O94735 |
| S602-A01 | A2QAC0 | EFP7G1BZ1 | EFP2C7GS0 |
| S603-A01 | Q96V44 | EFP2BNSMN | P31867* |
| S607-A02 | Q7SI09 | Q70FD1 | A2Q8B5 |
| S602-A02 | A2QAC0 | Q70FD1 | A2Q8B5 |
| S606-A02 | A2QAC0 | EFP3RCJ9K | P31867 |
| S605-A03 | Q7SI09 | EFP3RCJ9K | EFP2C7GS0 |
| S603-A03 | Q763T4 | Q70FD1 | A2Q8B5 |
| S603-A05 | Q7SI09 | EFP3RCJ9K | P31867 |
| S601-A05 | A0A1E4SVR6 | G3YG17 | P31867 |
| S604-A05 | Q96V44 | G3YG17 | A2Q8B5 |
| S602-A05 | Q763T4 | Q70FD1 | P31867 |
| S607-A06 | Q763T4 | EFP3RCJ9K | EFP2C7GS0 |
| S605-A06 | Q7SI09 | EFP7G1BZ1 | O94735 |
| S603-A06 | Q763T4 | EFP3RCJ9K | P31867* |
| S603-A07 | Q763T4 | G3YG17 | A2Q8B5 |
| S604-A07 | A2QAC0 | EFP7G1BZ1 | A2Q8B5 |
| S608-A08 | A0A1E4SVR6 | EFP7G1BZ1 | EFP2C7GS0 |
| S607-A09 | A2QAC0 | G3YG17 | EFP2C7GS0 |
| S608-A09 | A2QAC0 | EFP2BNSMN | A2Q8B5 |
| S603-A09 | Q7SI09 | EFP3RCJ9K | O94735 |
| S607-A10 | A0A1E4SVR6 | EFP2BNSMN | O94735 |
| S601-B01 | Q96V44 | EFP2BNSMN | A2Q8B5 |
| S608-B01 | Q96V44 | G3YG17 | O94735 |
| S601-B02 | Q763T4 | EFP7G1BZ1 | EFP2C7GS0 |
| S603-B02 | A2QAC0 | G3YG17 | P31867 |
| S602-B02 | Q96V44 | G3YG17 | EFP2C7GS0 |
| S604-B02 | Q763T4 | Q70FD1 | O94735 |
| S601-B03 | A0A1E4SVR6 | G3YG17 | O94735 |
| S608-B04 | A0A1E4SVR6 | G3YG17 | A2Q8B5 |
| S601-B04 | A0A1E4SVR6 | EFP2BNSMN | EFP2C7GS0 |
| S607-B04 | A0A1E4SVR6 | EFP3RCJ9K | G4N708 |
| S601-B06 | A0A1E4SVR6 | G3YG17 | EFP2C7GS0* |
| S607-B06 | A0A1E4SVR6 | EFP2BNSMN | A2Q8B5 |
| S608-B06 | Q96V44 | EFP7G1BZ1 | EFP2C7GS0 |
| S607-B08 | A2QAC0 | EFP7G1BZ1 | A2Q8B5 |
| S602-B08 | A0A1E4SVR6 | EFP2BNSMN | G4N708 |
| S601-B08 | Q7SI09 | EFP7G1BZ1* | O94735 |
| S607-C01 | Q7SI09 | EFP3RCJ9K | P31867 |
| S602-C01 | A0A1E4SVR6 | EFP3RCJ9K | EFP2C7GS0 |
| S608-C01 | Q763T4 | Q70FD1 | P31867 |
| S601-C02 | A0A1E4SVR6 | G3YG17 | O94735 |
| S601-C03 | Q763T4 | EFP2BNSMN | A2Q8B5 |
| S608-C04 | A2QAC0 | EFP3RCJ9K | P31867 |
| S607-C04 | A2QAC0 | EFP3RCJ9K | EFP2C7GS0* |
| S604-C04 | A2QAC0 | EFP3RCJ9K | O94735 |
| S605-C05 | Q763T4 | EFP2BNSMN | A2Q8B5 |
| S605-C06 | Q763T4 | EFP7G1BZ1 | O94735 |
| S607-C06 | Q763T4 | EFP7G1BZ1 | A2Q8B5 |
| S602-C08 | Q7SI09 | EFP7G1BZ1 | EFP2C7GS0 |
| S605-C08 | Q763T4 | EFP2BNSMN | O94735 |
| S601-C09 | A0A1E4SVR6 | EFP2BNSMN | A2Q8B5 |
| S606-C10 | Q763T4 | EFP2BNSMN | O94735 |
| S602-D01 | A0A1E4SVR6 | EFP3RCJ9K | A2Q8B5 |
| S607-D01 | Q763T4 | EFP7G1BZ1 | EFP2C7GS0* |
| S605-D02 | Q96V44 | EFP2BNSMN | G4N708 |
| S608-D02 | Q96V44 | EFP3RCJ9K | O94735 |
| S603-D02 | Q96V44 | EFP2BNSMN | P31867 |
| S603-D03 | Q763T4 | EFP3RCJ9K | O94735 |
| S601-D03 | A0A1E4SVR6 | EFP7G1BZ1 | G4N708 |
| S605-D03 | Q7SI09 | EFP7G1BZ1 | O94735 |
| S602-D04 | A2QAC0 | G3YG17 | O94735 |
| S603-D04 | A0A1E4SVR6 | Q70FD1 | A2Q8B5 |
| S605-D04 | Q96V44 | G3YG17 | O94735 |
| S603-D05 | Q7SI09 | EFP2BNSMN | EFP2C7GS0* |
| S605-D06 | Q763T4 | G3YG17 | A2Q8B5 |
| S603-D06 | Q763T4 | G3YG17 | O94735 |
| S605-D07 | Q96V44 | EFP7G1BZ1 | A2Q8B5 |
| S607-D07 | A2QAC0 | G3YG17 | A2Q8B5 |
| S603-D07 | Q763T4 | EFP3RCJ9K | P31867 |
| S608-D07 | A2QAC0 | EFP7G1BZ1 | O94735 |
| S602-D07 | Q763T4 | EFP3RCJ9K | P31867 |
| S603-D08 | A2QAC0 | EFP2BNSMN | A2Q8B5 |
| S607-D08 | A0A1E4SVR6 | EFP2BNSMN | EFP2C7GS0 |
| S606-D08 | A0A1E4SVR6 | EFP2BNSMN | P31867 |
| S605-D08 | A0A1E4SVR6 | EFP7G1BZ1 | P31867 |
| S608-D08 | A2QAC0 | G3YG17 | EFP2C7GS0 |
| S607-D09 | A0A1E4SVR6 | G3YG17 | A2Q8B5 |
| S602-D09 | Q7SI09 | G3YG17 | P31867 |
| S606-D10 | Q7SI09 | EFP2BNSMN | P31867 |
| S607-D10 | Q96V44 | EFP7G1BZ1 | P31867 |
| S603-E01 | Q96V44 | G3YG17 | A2Q8B5 |
| S605-E01 | A0A1E4SVR6 | G3YG17 | O94735 |
| S607-E01 | Q96V44 | EFP3RCJ9K | O94735 |
| S603-E02 | A0A1E4SVR6 | EFP7G1BZ1 | O94735 |
| S602-E02 | A0A1E4SVR6 | EFP3RCJ9K | O94735 |
| S604-E02 | A2QAC0* | EFP3RCJ9K | O94735 |
| S601-E02 | Q96V44 | G3YG17 | A2Q8B5 |
| S607-E03 | Q763T4 | EFP7G1BZ1 | O94735 |
| S605-E03 | Q96V44 | EFP2BNSMN | A2Q8B5 |
| S608-E03 | Q763T4 | EFP3RCJ9K | O94735 |
| S603-E04 | Q763T4 | EFP2BNSMN* | EFP2C7GS0 |
| S602-E04 | A0A1E4SVR6 | G3YG17 | O94735 |
| S606-E06 | A2QAC0 | EFP2BNSMN | P31867 |
| S605-E06 | A0A1E4SVR6 | EFP3RCJ9K | A2Q8B5 |
| S605-E07 | Q763T4 | EFP7G1BZ1 | EFP2C7GS0 |
| S606-E07 | A2QAC0 | EFP7G1BZ1 | P31867 |
| S605-E10 | Q7SI09 | G3YG17 | P31867 |
| S607-E10 | Q96V44 | G3YG17 | P31867 |
| S606-E10 | Q7SI09 | EFP2BNSMN | A2Q8B5 |
| S604-F01 | A0A1E4SVR6 | EFP7G1BZ1 | A2Q8B5 |
| S602-F01 | Q763T4 | EFP3RCJ9K | G4N708 |
| S601-F01 | A0A1E4SVR6 | EFP2BNSMN | P31867 |
| S604-F02 | A2QAC0 | G3YG17 | A2Q8B5 |
| S603-F02 | Q763T4 | EFP3RCJ9K | P31867 |
| S602-F02 | Q96V44 | G3YG17 | O94735 |
| S606-F03 | Q7SI09 | EFP7G1BZ1 | G4N708 |
| S607-F04 | Q7SI09 | EFP2BNSMN* | A2Q8B5 |
| S606-F04 | Q7SI09 | EFP7G1BZ1 | P31867 |
| S601-F05 | Q763T4 | G3YG17 | G4N708 |
| S606-F05 | Q96V44 | EFP3RCJ9K | G4N708 |
| S603-F05 | Q96V44 | G3YG17 | P31867 |
| S607-F06 | A0A1E4SVR6 | EFP3RCJ9K | O94735 |
| S606-F07 | A0A1E4SVR6 | EFP3RCJ9K | A2Q8B5 |
| S607-F07 | Q763T4 | EFP3RCJ9K | G4N708 |
| S607-F08 | Q7SI09 | G3YG17 | EFP2C7GS0 |
| S605-F08 | Q7SI09 | G3YG17 | G4N708* |
| S606-F09 | A2QAC0 | EFP2BNSMN | EFP2C7GS0 |
| S601-F09 | Q96V44 | EFP3RCJ9K | P31867 |
| S607-F10 | Q763T4 | EFP2BNSMN | P31867 |
| S603-F10 | Q7SI09 | EFP7G1BZ1 | P31867 |
| S607-G01 | Q96V44 | EFP7G1BZ1 | O94735 |
| S606-G03 | Q763T4 | G3YG17 | EFP2C7GS0 |
| S607-G03 | Q96V44 | EFP2BNSMN | EFP2C7GS0* |
| S601-G03 | Q7SI09 | Q70FD1 | O94735 |
| S605-G03 | Q96V44 | EFP7G1BZ1 | O94735* |
| S602-G03 | A0A1E4SVR6 | EFP3RCJ9K | A2Q8B5 |
| S605-G04 | A2QAC0 | EFP2BNSMN | A2Q8B5* |
| S603-G04 | Q763T4 | EFP3RCJ9K | EFP2C7GS0 |
| S607-G04 | Q763T4 | EFP7G1BZ1 | EFP2C7GS0* |
| S607-G05 | Q96V44 | EFP3RCJ9K | O94735 |
| S607-G06 | Q7SI09 | EFP3RCJ9K | O94735 |
| S602-G06 | A0A1E4SVR6 | Q70FD1 | O94735 |
| S606-G06 | A2QAC0 | EFP3RCJ9K | O94735* |
| S608-G06 | A2QAC0 | G3YG17* | P31867 |
| S601-G06 | A2QAC0 | EFP7G1BZ1 | O94735 |
| S602-G07 | Q96V44 | G3YG17 | P31867 |
| S604-G07 | Q763T4 | Q70FD1 | G4N708 |
| S603-G08 | A2QAC0 | G3YG17 | O94735 |
| S607-G08 | Q7SI09 | G3YG17 | O94735 |
| S608-G08 | A2QAC0 | G3YG17 | G4N708 |
| S601-G08 | Q96V44 | EFP7G1BZ1 | A2Q8B5 |
| S606-G08 | Q7SI09 | EFP3RCJ9K | P31867 |
| S606-G09 | Q96V44 | EFP3RCJ9K | EFP2C7GS0 |
| S607-G09 | Q96V44 | EFP3RCJ9K | P31867 |
| S608-G09 | A2QAC0 | G3YG17 | O94735 |
| S606-G10 | A0A1E4SVR6 | EFP7G1BZ1 | O94735 |
| S605-G10 | Q7SI09 | EFP2BNSMN | O94735 |
| S607-G10 | A0A1E4SVR6 | G3YG17 | G4N708 |
| S608-G10 | Q7SI09 | EFP7G1BZ1 | EFP2C7GS0 |
| S605-H01 | Q96V44 | G3YG17 | O94735 |
| S602-H01 | Q96V44 | Q70FD1 | A2Q8B5 |
| S606-H01 | Q96V44 | EFP7G1BZ1 | EFP2C7GS0 |
| S606-H02 | Q763T4 | EFP3RCJ9K | G4N708 |
| S602-H02 | Q7SI09 | G3YG17 | A2Q8B5 |
| S607-H02 | Q96V44 | G3YG17 | P31867 |
| S605-H03 | Q7SI09 | EFP7G1BZ1 | A2Q8B5 |
| S606-H03 | Q7SI09 | EFP7G1BZ1 | EFP2C7GS0 |
| S604-H04 | Q763T4 | EFP2BNSMN | O94735 |
| S606-H04 | Q763T4 | EFP2BNSMN | A2Q8B5 |
| S607-H04 | Q7SI09 | EFP3RCJ9K | O94735 |
| S601-H04 | Q96V44 | G3YG17 | P31867* |
| S608-H04 | Q96V44 | EFP3RCJ9K | EFP2C7GS0 |
| S603-H04 | Q96V44 | EFP3RCJ9K | O94735 |
| S607-H05 | A0A1E4SVR6 | EFP2BNSMN | P31867 |
| S608-H05 | A0A1E4SVR6 | EFP7G1BZ1 | O94735 |
| S601-H05 | A0A1E4SVR6 | EFP3RCJ9K | EFP2C7GS0* |
| S605-H05 | Q763T4 | G3YG17 | A2Q8B5 |
| S605-H06 | Q7SI09 | G3YG17 | A2Q8B5 |
| S601-H06 | Q763T4 | EFP3RCJ9K | A2Q8B5 |
| S602-H07 | A0A1E4SVR6 | G3YG17* | EFP2C7GS0 |
| S604-H08 | Q7SI09* | EFP3RCJ9K | O94735 |
| S607-H09 | Q763T4 | EFP7G1BZ1 | A2Q8B5 |
| S606-H09 | Q7SI09 | EFP7G1BZ1 | P31867 |
| S607-H10 | A2QAC0 | EFP2BNSMN | EFP2C7GS0 |
| S606-H10 | Q96V44 | G3YG17 | O94735 |

1: A recombinant host cell having an active arabinose fermentation pathway, wherein the cell comprises:
(i) a heterologous polynucleotide encoding an aldose reductase (AR),
(ii) a heterologous polynucleotide encoding a L-arabinitol 4-dehydrogenase (LAD), and
(iii) a heterologous polynucleotide encoding a L-xylulose reductase (LXR);
wherein the L-xylulose reductase (LXR) has a mature polypeptide sequence with at least 80% sequence identity to any one of SEQ ID NOs: 297, 300, 302 and 304.

2: The recombinant host cell of claim 1, wherein the aldose reductase (AR) has a mature polypeptide sequence with at least 80% sequence identity to any one of SEQ ID NOs: 281-285.

3: The recombinant host cell of claim 1, wherein the L-arabinitol 4-dehydrogenase (LAD) has a mature polypeptide sequence with at least 80% sequence identity to any one of SEQ ID NOs: 286-296.

4: The recombinant host cell of claim 1, wherein the cell further comprises one or more heterologous polynucleotides selected from:
(iv) a heterologous polynucleotide encoding a xylitol dehydrogenase (XDH); and
(v) a heterologous polynucleotide encoding a xylulokinase (XK).

5: The recombinant host cell of claim 4, wherein the xylitol dehydrogenase (XDH) has a mature polypeptide sequence with at least 80% sequence identity to SEQ ID NO: 309.

6: The recombinant host cell of claim 4, wherein the xylulokinase (XK) has a mature polypeptide sequence with at least 80% sequence identity to SEQ ID NO: 75, SEQ ID NO: 310 or SEQ ID NO: 311.

7: The recombinant host cell of claim 1, wherein the cell further comprises heterologous polynucleotide encoding a non-phosphorylating NADP-dependent glyceraldehyde-3-phosphate dehydrogenase (GAPN).

8: The recombinant host cell of claim 7, wherein the heterologous polynucleotide encodes a non-phosphorylating NADP-dependent glyceraldehyde-3-phosphate dehydrogenase (GAPN) having a mature polypeptide sequence with at least 80% sequence identity to any one of SEQ ID NOs: 262-280.

9: The recombinant host cell of claim 1, wherein the cell further comprises an active xylose fermentation pathway.

10: The recombinant host cell of claim 9, wherein the cell comprises one or more heterologous polynucleotides selected from:
a heterologous polynucleotide encoding a xylose isomerase (XI), and
a heterologous polynucleotide encoding a xylulokinase (XK).

11: The recombinant host cell of claim 9, wherein the cell comprises one or more heterologous polynucleotides selected from:
a heterologous polynucleotide encoding an aldose reductase (AR),
a heterologous polynucleotide encoding a xylitol dehydrogenase (XDH), and
a heterologous polynucleotide encoding a xylulokinase (XK).

12: The recombinant host cell of claim 1, wherein the cell further comprises a heterologous polynucleotide encoding a glucoamylase.

13: The recombinant host cell of claim 1, wherein the cell further comprises a heterologous polynucleotide encoding an alpha-amylase.

14: The recombinant host cell of claim 1, wherein the cell is capable of higher anaerobic growth rate on xylose compared to the same cell without the heterologous polynucleotide encoding a L-xylulose reductase (LXR).

15: The recombinant host cell of claim 1, wherein the cell is capable of a higher rate of xylose consumption compared to the same cell without the heterologous polynucleotide encoding a L-xylulose reductase (LXR).

16: The recombinant host cell of claim 1, wherein the cell is capable of higher xylose consumption compared to the same cell without the heterologous polynucleotide encoding a L-xylulose reductase (LXR) at 120 hours fermentation.

17: The recombinant yeast cell of claim 1, wherein an endogenous GPD and/or GPP gene is inactivated.

18: The recombinant host cell of claim 1, wherein the cell is a Saccharomyces cerevisiae cell.

19: A method of producing a derivative of a recombinant host cell of claim 1, the method comprising:
(a) providing:
(i) a first host cell; and
(ii) a second host cell, wherein the second host cell is a recombinant host cell of claim 1;
(b) culturing the first host cell and the second host cell under conditions which permit combining of DNA between the first and second host cells;
(c) screening or selecting for a derive host cell.

20: A method of producing a fermentation product from a starch-containing or cellulosic-containing material, the method comprising:
(a) saccharifying the starch-containing or cellulosic-containing material; and
(b) fermenting the saccharified material of step (a) with the recombinant host cell of claim 1 under suitable conditions to produce the fermentation product.

The application's sequence listing, which the Patent Office published only in electronic form, follows.

SEQUENCE LISTING (311 sequences)

SEQ ID NO: 1 - DNA, 621 bp, Saccharomyces cerevisiae
cagttcgagtttatcattatcaatactgccatttcaaagaatacgtaaataattaatagtagtgattttcctaactttatttagtcaaaaaattagccttttaattctgctgtaacccgtacatgcccaaaatagggggcgggttacacagaatatataacatcgtaggtgtctgggtgaacagtttattcctggcatccactaaatataatggagcccgctttttaagctggcatccagaaaaaaaaagaatcccagcaccaaaatattgttttcttcaccaaccatcagttcataggtccattctcttagcgcaactacagagaacaggggcacaaacaggcaaaaaacgggcacaacctcaatggagtgatgcaacctgcctggagtaaatgatgacacaaggcaattgacccacgcatgtatctatctcattttcttacaccttctattaccttctgctctctctgatttggaaaaagctgaaaaaaaaggttgaaaccagttccctgaaattattcccctacttgactaataagtatataaagacggtaggtattgattgtaattctgtaaatctatttcttaaacttcttaaattctacttttatagttagtctt

SEQ ID NO: 2 - DNA, 644 bp, Saccharomyces cerevisiae
agctacctatattccaccataatatcaatcatgcggttgctggtgtatttaccaataatgtttaatgtatatatattaggggccgtatacttacatatagtagatgtcaagcgtaggcgcttcccctgccggctgtgacggcgccataaccaaggtatctatagaccgccaatcagcaaactacctccgtacattcatgttgcacccacacatgtacacacccagaccgcaacaaattacccataaggttgtttgtgacggcgtcgtacaagagaacgtgggaactttttaggctcaccaaaaaagaaaggaaaaatacgagttgctgacagaagcctcaagaaaaaaaaaattcttcttcgactatgctggaggcagagatgatcgagccggtagttaactatatatagctaaattggttccatcaccttcttttctggtgtcgctccttctagtgctatttctggcttttcctattttttttttttccatttttctttctctctttctaatatataaattctcttgcattttctatttttctctctatctattctacttgtttattcccttcaaggtttttttttaaggagtacttgtttttagaatatacggtcaacgaactataattaagctagaacaaa

SEQ ID NO: 3 - DNA, 457 bp, Saccharomyces cerevisiae
ctccagaaaggcaacgcaaaattttttttccagggaataaactttctatgacccactacttctcgtaggaacaatttcgggcccctgcgtgttcttctgaggttcatcttttacatttgcttctgctggataattttcagaggcaacaaggaaaaattagatggcaaaaagtcgtctttcaaggaaaaatccccaccatccttcgagatcccctgtaacttattggcaactgaaagaatgaaaaggaggaaaatacaaaatatactagaactgaaaaaaaaaagtataaatagagacgatatatgccaatacttcacaatgttcgaatccattcttcatttgcagctattgtaaaataataaaacatcaagaacaaacaagctcaacttgtcttttctaagaacaaagaataaacacaaaaacaaaaagtttttttaattttaatcgctagaacaaa

SEQ ID NO: 4 - DNA, 700 bp, Saccharomyces cerevisiae
gtgagtaaggaaagagtgaggaactatcgcatacctgcatttaaagatgccgatttgggcgcgaatcctttattttggcttcaccctcatactattatcagggccagaaaaaggaagtgtttccctccttcttgaattgatgttaccctcataaagcacgtggcctcttatcgagaaagaaattaccgtcgctcgtgatttgtttgcaaaaagaacaaaactgaaaaaacccagacacgctcgacttcctgtcatcctattgattgcagcttccaatttcgtcacacaacaaggtcctagcgacggctcacaggttttgtaacaagcaatcgaaggttctggaatggcgggaaagggtttagtaccacatgctatgatgcccactgtgatctccagagcaaagttcgttcgatcgtactgttactctctctctttcaaacagaattgtccgaatcgtgtgacaacaacagcctgttctcacacactcttttcttctaaccaagggggtggtttagtttagtagaacctcgtgaaacttacatttacatatatataaacttgcataaattggtcaatgcaagaaatacatatttggtcttttctaattcgtagtttttcaagttcttagatgctttctttttctcttttttacagatcatcaaggaagtaattatctactttttacaacaaatataaaaca

SEQ ID NO: 5 - DNA, 705 bp, Sacharromyces cerevisiae
atccttttgttgtttccgggtgtacaatatggacttcctcttttctggcaaccaaacccatacatcgggattcctataataccttcgttggtctccctaacatgtaggtggcggaggggagatatacaatagaacagataccagacaagacataatgggctaaacaagactacaccaattacactgcctcattgatggtggtacataacgaactaatactgtagccctagacttgatagccatcatcatatcgaagtttcactaccctttttccatttgccatctattgaagtaataataggcgcatgcaacttcttttctttttttttcttttctctctcccccgttgttgtctcaccatatccgcaatgacaaaaaaatgatggaagacactaaaggaaaaaattaacgacaaagacagcaccaacagatgtcgttgttccagagctgatgaggggtatctcgaagcacacgaaactttttccttccttcattcacgcacactactctctaatgagcaacggtatacggccttccttccagttacttgaatttgaaataaaaaaaagtttgctgtcttgctatcaagtataaatagacctgcaattattaatcttttgtttcctcgtcattgttctcgttccctttcttccttgtttctttttctgcacaatatttcaagctataccaagcatacaatcaact

SEQ ID NO: 6 - DNA, 700 bp, Saccharomyces cerevisiae
aagaggatgtccaatattttttttaaggaataaggatacttcaagactagattcccccctgcattcccatcagaaccgtaaaccttggcgctttccttgggaagtattcaagaagtgccttgtccggtttctgtggctcacaaaccagcgcgcccgatatggctttcttttcacttatgaatgtaccagtacgggacaattagaacgctcctgtaacaatctctttgcaaatgtggggttacattctaaccatgtcacactgctgacgaaattcaaagtaaaaaaaaatgggaccacgtcttgagaacgatagattttctttattttacattgaacagtcgttgtctcagcgcgctttatgttttcattcatacttcatattataaaataacaaaagaagaatttcatattcacgcccaagaaatcaggctgctttccaaatgcaattgacacttcattagccatcacacaaaactctttcttgctggagcttcttttaaaaaagacctcagtacaccaaacacgttacccgacctcgttattttacgacaactatgataaaattctgaagaaaaaataaaaaaattttcatacttcttgcttttatttaaaccattgaatgatttcttttgaacaaaactacctgtttcaccaaaggaaatagaaagaaaaaatcaattagaagaaaacaaaaaacaaa

SEQ ID NO: 7 - protein, 19 aa, Saccharomyces cerevisiae
MRFPSIFTTVLFAASSALA

SEQ ID NO: 8 - protein, 556 aa, Gloeophyllum sepiarium
QSVDSYVSSEGPIAKAGVLANIGPNGSKASGASAGVVVASPSTSDPDYWYTWTRDSSLVFKSLIDQYTTGIDGTSSLRTLIDDFVTAEANLQQVSNPSGTLTTGGLGEPKFNVDETAFTGAWGRPQRDGPALRSTALITYGNWLLSNGNTSYVTSNLWPIIQNDLGYVVSYWNQSTYDLWEEVDSSSFFTTAVQHRALREGAAFATAIGQTSQVSSYTTQADNLLCFLQSYWNPSGGYITANTGGGRSGKDANTLLASIHTYDPSAGCDAATFQPCSDKALSNLKVYVDSFRSVYSINSGIASNAAVATGRYPEDSYQGGNPWYLTTFAVAEQLYDALNVWESQGSLEVTSTSLAFFQQFSSGVTAGTYSSSSSTYSTLTSAIKSFADGFVAVNAKYTPSNGGLAEQYSKSDGSPLSAVDLTWSYASALTAFEARNNTQFAGWGAAGLTVPSSCSGNSGGPTVAVTFNVNAETVWGENIYLTGSVDALENWSADNALLLSSANYPTWSITVNLPASTAIEYKYIRKNNGAVTWESDPNNSITTPASGSTTENDTWR

SEQ ID NO: 9 - protein, 374 aa, Aspergillus niger
APAPTRKGFTINQIARPANKTRTINLPGMYARSLAKFGGTVPQSVKEAASKGSAVTTPQNNDEEYLTPVTVGKSTLHLDFDTGSADLWVFSDELPSSEQTGHDLYTPSSSATKLSGYTWDISYGDGSSASGDVYRDTVTVGGVTTNKQAVEAASKISSEFVQNTANDGLLGLAFSSINTVQPKAQTTFFDTVKSQLDSPLFAVQLKHDAPGVYDFGYIDDSKYTGSITYTDADSSQGYWGFSTDGYSIGDGSSSSSGFSAIADTGTTLILLDDEIVSAYYEQVSGAQESEEAGGYVFSCSTNPPDFTVVIGDYKAVVPGKYINYAPISTGSSTCFGGIQSNSGLGLSILGDVFLKSQYVVFNSEGPKLGFAAQA

SEQ ID NO: 10 - protein, 590 aa, Trichoderma reesei
SVHLLESLEKLPHGWKAAETPSPSSQIVLQVALTQQNIDQLESRLAAVSTPTSSTYGKYLDVDEINSIFAPSDASSSAVESWLQSHGVTSYTKQGSSIWFQTNISTANAMLSTNFHTYSDLTGAKKVRTLKYSIPESLIGHVDLISPTTYFGTTKAMRKLKSSGVSPAADALAARQEPSSCKGTLVFEGETFNVFQPDCLRTEYSVDGYTPSVKSGSRIGFGSFLNESASFADQALFEKHFNIPSQNFSVVLINGGTDLPQPPSDANDGEANLDAQTILTIAHPLPITEFITAGSPPYFPDPVEPAGTPNENEPYLQYYEFLLSKSNAEIPQVITNSYGDEEQTVPRSYAVRVCNLIGLLGLRGISVLHSSGDEGVGASCVATNSTTPQFNPIFPATCPYVTSVGGTVSFNPEVAWAGSSGGFSYYFSRPWYQQEAVGTYLEKYVSAETKKYYGPYVDFSGRGFPDVAAHSVSPDYPVFQGGELTPSGGTSAASPVVAAIVALLNDARLREGKPTLGFLNPLIYLHASKGFTDITSGQSEGCNGNNTQTGSPLPGAGFIAGAHWNATKGWDPTTGFGVPNLKKLLALVRF

SEQ ID NO: 11 - protein, 511 aa, Thermoascus aurantiacus
VPVEVAGSAQGLDVTLSQVGNTRIKAVVKNTGSEDVTFVHLNFFKDAAPVQKVSLFRNATEVQFQGIKQRLITEGLSDDALTTLAPGATIEDEFDIASTSDLSEGGTITINSNGLVPITTDNKVTGYIPFTSNELSIDVDAAEAASVTQAVKILERRTRISSCSGSRQSALTTALRNAASLANKAADAAQSGSASKFSEYFKTTSSSTRQTVAARLRAVAREASSSSSGATTYYCLDPFGYCSGNVLAYTLPSYNIIANCPIFYTYLPPLTSTCHAQDQATTVLHEFTHAPGVYSPGTLDLAYGYQAAMGLSSSQAVMNADTYALYANAIYLGCTRISSCSGSRQSALTTALRNAASLANAAADAAQSGSASKFSEYFKTTSSSTRQTVAARLRAVAREASSSSSGATTYYCDDPYGYCSSNVLAYTLPSYNIIANCDIFYTYLPALTSTCHAQDQATTALHEFTHAPGVYSPGTDDLAYGYQAAMGLSSSQAVMNADTYALYANAIYLGC

SEQ ID NO: 12 - protein, 550 aa, Dichomitus squalens
KPTARNLKLHESRPSAPNGFSLVGSADSNRTLKLRLALAESNFSELERKLYDVSTPKSANYGKHLSKAEVQQLVAPGQDSIDAVNAWLKENDITAKTISSTGEWISFEVPVSKANDLFDADFSVFKHDDTGVEAIRTLSYSIPAELQGHLDLVHPTVTFPNPYSHLPVFQSPVKKTAEIQNFTAGAIPSSCSSTITPACLQAIYNIPTTAATESSNQLGVTGFIDQYANKKDLKTFLKKYRTDISSSTTFTLQTLDGGSNSQTGSKAGVEANLDIQYTVGVATGVPTTFISVGDDFQDGDLEGFLDVINALLDEDAPPSVLTTSYGQDESTISRALAVKLCNAYAQLGARGVSILFASGDGGVSGSQSASCSKFVPTFPSGCPYMTSVGATQGVNPETAADFSSGGFSNYWGVPDYQSDAVSTYLSALGKTNSGKYNASGRGFPDVSTQGVSFEVVVDGSVEAVDGTSCASPTFASIISLVNDKLVAAGKSPLGFLNPFLYSDGVAALNDITSGSNPGCNTNGFPAKKGWDPVTGLGTPDFKKLLTAVGL

SEQ ID NO: 13 - protein, 353 aa, Nocardiopsis prasina
ATGALPQSPTPEADAVSMQEALQRDLDLTSAEAEELLAAQDTAFEVDEAAAEAAGDAYGGSVFDTESLELTVLVTDAAAVEAVEATGAGTELVSYGIDGLDEIVQELNAADAVPGVVGWYPDVAGDTVVLEVLEGSGADVSGLLADAGVDASAVEVTTSDQPELYADIIGGLAYTMGGRCSVGFAATNAAGQPGFVTAGHCGRVGTQVTIGNGRGVFEQSVFPGNDAAFVRGTSNFTLTNLVSRYNTGGYATVAGHNQAPIGSSVCRSGSTTGWHCGTIQARGQSVSYPEGTVTNMTRTTVCAEPGDSGGSYISGTQAQGVTSGGSGNCRTGGTTFYQEVTPMVNSWGVRLRT

SEQ ID NO: 14 - protein, 456 aa, Penicillium simplicissimum
APASTAKDSVSSVVKNGVKYTVFEHAATGAKMEFVKNSGICETTPGVNQYSGYLSVGSNMNMWFWFFEARNNPQQAPLAAWFNGGPGCSSMIGLFQENGPCHFVNGDSTPSLNEYSWNNYANMLYVDQPIGVGFSYGTDDVTSTVTAAPYVWKLLQAFYAQFPEYESRDFAIFTESYGGHYGPEFASYIQEQNSAIKTGSISGENINLVALGVNNGWIDSTIQEKAYIDFSYNNSYQQLIDDSQRTSLLSAYNSQCLPAIQKCTKSGSNSDCQNADSVCYNKIEGPISSSGDWDVYDIREPSNDPYPPSTYSTYLSNADVVKAIGAQSSYQECPNGPYNKFASTGDNPRSFLSTLSSVVKSGINVLVWAGDADWICNWLGNYEVANAVDFSGHTEFSAKDLAPYTVNGTEKGMFKNVANFSFLKVYGAGHEVPYYQPDTALQVFEQVLQNKPIFST

SEQ ID NO: 15 - protein, 502 aa, Aspergillus niger
LQNPHRRAVPPPLSHRSVASRSVPVERRTTDFEYLTNKTARFLVNGTSIPEVDFDVGESYAGLLPNTPTGNSSLFFWFFPSQNPEASDEITIWLNGGPGCSSLDGLLQENGPFLWQPGTYKPVPNPYSWTNLTNVVYIDQPAGTGFSPGPSTVNNEEDVAAQFNSWFKHFVDTFDLHGRKVYITGESYAGMYVPYIADAMLNEEDTTYFNLKGIQINDPSINSDSVMMYSPAVRHLNHYNNIFQLNSTFLSYINAKADKCGYNAFLDKAITYPPPSPFPTAPEITEDCQVWDEVVMAAYDINPCFNYYHLIDFCPYLWDVLGFPSLASGPNNYFNRSDVQKILHVPPTDYSVCSETVIFANGDGSDPSSWGPLPSVIERTNNTIIGHGWLDYLLFLNGSLATIQNMTWNGKQGFQRPPVEPLFVPYHYGLAELYWGDEPDPYNLDAGAGYLGTAHTERGLTFSSVYLSGHEIPQYVPGAAYRQLEFLLGRISSLSAKGNYTS

SEQ ID NO: 16 - protein, 547 aa, Meriphilus giganteus
TPTGRNLKLHEAREDLPAGFSLRGAASPDTTLKLRIALVQNNFAELEDKLYDVSTPSSANYGNHLSKEEVEQYIAPAPESVKAVNAWLTENGLDAHTISPAGDWLAFEVPVSKANELFDADFSVFTHDESGLEAIRTLAYSIPAELQGHLDLVHPTVTFPNPNAHLPVVRSTQPIRNLTGRAIPASCASTITPACLQAIYGIPTTKATQSSNKLAVSGFIDQFANKADLKSFLAQFRKDISSSTTFSLQTLDGGENDQSPSEAGIEANLDIQYTVGLATGVPTTFISVGDDFQDGNLEGFLDIINFLLGESNPPQVLTTSYGQNENTISAKLANQLCNAYAQLGARGTSILFASGDGGVSGSQSAHCSNFVPTFPSGCPFMTSVGATQGVSPETAAAFSSGGFSNVFGIPSYQASAVSGYLSALGSTNSGKFNRSGRGFPDVSTQGVDFQIVSGGQTIGVDGTSCASPTFASVISLVNDRLIAAGKSPLGFLNPFLYSSAGKAALNDVTSGSNPGCSTNGFPAKAGWDPVTGLGTPNFAKLLTAVGL

SEQ ID NO: 17 - protein, 541 aa, Lecanicillium sp.
APAPHGPLVKFGEITKLPSKWIATGAADSDAVIKAQIGIKQNNIKGLQDKLADIADPNSPNYGQWLSKEEVDKYSAPAAADVAAVKAWLASSGITDVTMPTNDWIEFSVPVSKMESLLGSKYEWFVHLETGEKVPRTKQFSVPQNLHDLIDVVTPTTVLYHNMGPHAHASPQAADASGLTSPASIKSAYNVDYKGTGNTLVGTTGFLGVGASHQDYANFARQFSPGLTDFKDVSINGGSNSGDGSALEGNLDTQYCGALAAPNPSEYLAHAPEGSDGSSFNDAMLAFGNYLNANSNPPSAVSTSYGGEEDGTDPNYMDRICNEFMKAGSRGVSIFFSSGDNGVGGNGESSCYNGYYPLWPASCPYVTTVGGTEFDGSGREVVANFEQYNKNVKSPGGGFSNHFPAPSYNKNVTTAYANSLSAAQKQRLNPNGRGFPDIALVSVKYQVNVNGQISQVLGTSASSPSMAGLVGLLNDYRKTQGKPNLGFINPLLYSDKVKPALRDVTSGANKGCDSSGLPAKTGWDAASGLGSFDFAKLRTLV

SEQ ID NO: 18 - protein, 633 aa, Talaromyces proteolyticus
VPAPSKRHVVHERRDALPHSWSEPRRVDGRTQLPVRIGLTQSNIDESHDMLMDIASPSSPNYRKYMTVHEVNELFAPAGEAVSAVRDWLESAGIAAERVTQSANKQWLQFDGDAAEVESLLGAEYYIYTHDTNGRSHMGCEKYHVPEHISHHIDYIIPGVKSLEVREPQPAELEKRTFGFRKPQPPLFKALPESLETIINSILGGLLDLCSTVITPSCIKTLYNITEGTTATKGNELGIFEDLGDYYSQTDLDLFFTLFYSQIPAGTGPTLKGIDGAQAPTQTLTQAGPESDLDFQVSYPIIWPQNSILFQTDDANYEANYTFNGFLNNFLDAIDGSYCTYSAFGIDGNTADDPPYPDPASNGYKGSLQCGVYEPTNVISISYGGDEAGLSVNYQKRQCNEYKKLGLQGVSVVVSSGDSGVAGADGCLGGGKIFNPDFPAGCPYITTVGATYLPSGASSTSDSEVAVSRFPSGGGFSNIYSQPSYQSDAVNTYLTQHTPPYPAYETSDNSSVGANGGIYNKAGRGYPDVAAVGDNIVIFNAGAPTLIGGTSASAPIFASILTRINEVLLAKKGTTVGFVNPTLYANPDAFHDITSGDNPGCSTNGFSTAPGWDPVTGLGTPNYPALLKVFLGE

SEQ ID NO: 19 - protein, 371 aa, Penicillium ranomafanaense
VPTGGKKSFTVNQVAVSATKTQNFANNYARALAKYGAKVPTHVQAAAQQSGSATTTPESDDEEYLTPVNVGGTTLNLDFDTGSADLWVFSSELPASEQTGHSLYKPNNGTKLSGYTWSISYGDGSSASGDVYRDTVSVGGVKATGQAVEAASTISQQFTQDQNNDGLLGLAFSSINTVKPKSQTTFFDTVKSTLASPLFAVSLKHNAPGSYDFGFIDKSKYTGSLTYTDVDSSQGFWGFTADSYKIGSTTGSSIKGIADTGTTLLLLDDEVVSAYYKQVSGAASDSSAGGYTFDCSSTLPDFTVSISGYDAVVPGSLINYTPVSQGSSKCLGGIQSNSGLGFSIFGDIFLKSQYVVFDSNGPRLGFAAQSS

SEQ ID NO: 20 - protein, 578 aa, Aspergillus oryzae
EAFEKLSAVPKGWHYSSTPKGNTEVCLKIALAQKDAAGFEKTVLEMSDPDHPSYGQHFTTHDEMKRMLLPRDDTVDAVRQWLENGGVTDFTQDADWINFCTTVDTANKLLNAQFKWYVSDVKHIRRLRTLQYDVPESVTPHINTIQPTTRFGKISPKKAVTHSKPSQLDVTALAAAVVAKNISHCDSIITPTCLKELYNIGDYQADANSGSKIAFASYLEEYARYADLENFENYLAPWAKGQNFSVTTFNGGLNDQNSSSDSGEANLDLQYILGVSAPLPVTEFSTGGRGPLVPDLTQPDPNSNSNEPYLEFFQNVLKLDQKDLPQVISTSYGENEQEIPEKYARTVCNLIAQLGSRGVSVLFSSGDSGVGEGCMTNDGTNRTHFPPQFPAACPWVTSVGATFKTTPERGTYFSSGGFSDYWPRPEWQDEAVSSYLETIGDTFKGLYNSSGRAFPDVAAQGMNFAVYDKGTLGEFDGTSASAPAFSAVIALLNDARLRAGKPTLGFLNPWLYKTGRQGLQDITLGASIGCTGRARFGGAPDGGPVVPYASWNATQGWDPVTGLGTPDFAELKKLALGN

SEQ ID NO: 21 - protein, 456 aa, Talaromyces liani
APASTTKDNVSSVVKNGVTYTVFEHAATGAKMEFVKNSGICETTPGVNQYSGYLSVGNNMNMWFWFFEARNNPQTAPLAAWFNGGPGCSSMIGLFQENGPCHFVNGASTPSLNEYSWNNYANMLYVDQPIGVGFSYGTDDVTSTVTAAPYVWKLLQAFYAQFPEYQSRDFAIFTESYGGHYGPEFAAYIQEQNSGIAAGSVSGENINLIALGVNNGWIDPAIQEKAYIDFSYNNSYQQLIDDSQRTNLLSDYNDQCLPAIQQCAQTGRNSDCQNADNVCYDTIEGPISSSGNWDVYDIREPSNDPYPPSTYSSYLSNSRVVKAIGAQTSYQECPNGPYNKFASTGDNPRSFLSTLSSVVQSGIHVLVWAGDADWICNWLGNYRVANAVDFPGHAEFSAKALAPYTVNGTEKGMFKNVDNFSFLKVYGAGHEVPYYQPATALQVFEQILQNKSITST

SEQ ID NO: 22 - protein, 589 aa, Thermoascus thermophilus
EVFERLRAVPEGWRFSATPSDDQPIRLQIALQQHDVEGFERAVLDMSTPSSPNYGKHFQSHDEMKRMLLPSDDAVDAVLDWLQSAGITDIEEDADWINFRTTVGVANELLDTQFQWFVSETSSHVRRLRALEYSIPESVTPHIHMVQPTTRFGQIGRHHTTSREKPIVSGADIHASIAGANNQTTGTDCNTEITPKCLQDLYKFGGYKASANSGSKVGFCSYLEEYARYDDLALFEEALAPYAAGQNFSVITYNGGLNDQHSSSDSGEANLDLQYIVGVSAPLPVTEFSTGGRGELVPDLDQPNPADNSNEPYLDFLQNVLKLDQKDLPQVISTSYGENEQSVPEKYARSVCNLFMQLGSRGVSVIFSSGDSGVGSACLTNDGKNQTRFMPQFPASCPWVTSVGSTQHIAPEEATYFSSGGFSDLWPMPDYQKSAVGEYLDRLGSKWAGLYNPQGRGFPDVAAQGVNFNVYDKGSLKRFDGTSCSAPTFAGVIALLNDARLRARQPPMGFLNPWLYGAGKGGLNDIVNGGSTGCDGNARFGGAPNGSPVVPFASWNATQGWDPVSGLGTPDFSRLLKLAVPSRVGGRLA

SEQ ID NO: 23 - protein, 413 aa, Pyrococcus furiosus
AELEGLDESAAQVMATYVWNLGYDGSGITIGIIDTGIDASHPDLQGKVIGWVDFVNGRSYPYDDHGHGTHVASIAAGTGAASNGKYKGMAPGAKLAGIKVLGADGSGSISTIIKGVEWAVDNKDKYGIKVINLSLGSSQSSDGTDALSQAVNAAWDAGLVVVVAAGNSGPNKYTIGSPAAASKVITVGAVDKYDVITSFSSRGPTADGRLKPEVVAPGNWIIAARASGTSMGQPINDYYTAAPGTSMATPHVAGIAALLLQAHPSWTPDKVKTALIETADIVKPDEIADIAYGAGRVNAYKAINYDNYAKLVFTGYVANKGSQTHQFVISGASFVTATLYWDNANSDLDLYLYDPNGNQVDYSYTAYYDFEKVGYYNPTDGTWTIKVVSYSGSANYQVDVVSDGSLSQPGSSP

SEQ ID NO: 24 - protein, 387 aa, Trichoderma reesei
LPTEGQKTASVEVQYNKNYVPHGPTALFKAKRKYGAPISDNLKSLVAARQAKQALAKRQTGSAPNHPSDSADSEYITSVSIGTPAQVLPLDFDTGSSDLWVFSSETPKSSATGHAIYTPSKSSTSKKVSGASWSISYGDGSSSSGDVYTDKVTIGGFSVNTQGVESATRVSTEFVQDTVISGLVGLAFDSGNQVRPHPQKTWFSNAASSLAEPLFTADLRHGQNGSYNFGYIDTSVAKGPVAYTPVDNSQGFWEFTASGYSVGGGKLNRNSIDGIADTGTTLLLLDDNVVDAYYANVQSAQYDNQQEGVVFDCDEDLPSFSFGVGSSTITIPGDLLNLTPLEEGSSTCFGGLQSSSGIGINIFGDVALKAALVVFDLGNERLGWAQK

SEQ ID NO: 25 - protein, 408 aa, Rhizomucor miehei
RPVSKQSESKDKLLALPLTSVSRKFSQTKFGQQQLAEKLAGLKPFSEAAADGSVDTPGYYDFDLEEYAIPVSIGTPGQDFLLLFDTGSSDTWVPHKGCTKSEGCVGSRFFDPSASSTFKATNYNLNITYGTGGANGLYFEDSIAIGDITVTKQILAYVDNVRGPTAEQSPNADIFLDGLFGAAYPDNTAMEAEYGSTYNTVHVNLYKQGLISSPLFSVYMNTNSGTGEVVFGGVNNTLLGGDIAYTDVMSRYGGYYFWDAPVTGITVDGSAAVRFSRPQAFTIDTGTNFFIMPSSAASKIVKAALPDATETQQGWVVPCASYQNSKSTISIVMQKSGSSSDTIEISVPVSKMLLPVDQSNETCMFIILPDGGNQYIVGNLFLRFFVNVYDFGNNRIGFAPLASAYENE

SEQ ID NO: 26 - protein, 548 aa, Lenzites betulinus
KPMGRNLKVHEAREEIPDGFSLQGSAAPDTTLKLRIALVQSNFAELEQKLYDVSTPSSPNYGAHLSKEEVEQLVAPSADSVDAVNAWLKENDLSAQTISPAGDWLAFEVPVSKANELFDADFSVFTHDQTGLEAIRTMSYSIPAELQGHLDLVHPTVTFPNPYSHLPVVRSPIKASQNLTSRATIPASCASTITPACLQDIYGIPTTKATQSSNKLAVSGFIDQFANSADLATFLKKFRTDISSTTTFALQTLDGGSNSQSGSQAGVEANLDIQYTVGLASGVPVTFISVGDNFQDGDLEGFLDIINFLLAESAPPQVLTTSYGQNENTISVKLANQLCNAYAQLGARGTSILFASGDGGVSGSQSSSCSKFVPTFPSGCPFMTSVGATQGVNPETAADFSSGGFSNYFGIPSYQATAVKTYLTALGTTNSGKFNTSGRAFPDVSTQGVDFEIVVDGRTEGVDGTSCASPTFAAIISLVNDKLIAAGKSPLGFLNPFLYSTGASAFTDITSGSNPGCNTKGFPAKAGWDPVTGLGTPNFAKLLAAAGV

SEQ ID NO: 27 - protein, 547 aa, Neolentinus lepideus
GPAPRNLVLHESRDGVPEGFVKSSTASPDTTLKLRIALVQGDMASLEKALYDVSVPSSPLYGQHLSKQEVEEYVKPTQESVDAVNQWLSSEGITANTISPAGDWLQFSVPVSKANEMFDADFSVFTHTESGQQAIRTLSYSIPKELVGHLDLVHPTITFPNPYSHLPVVSSPAPRNLTIDASVPSSCGSTITPTCLQDLYGIPTTAATQSSNKLAVSGFIDQYANKADLKSFLTTYRKDISSSTTFTLETIDGGENPQDGSDAGVEANLDTQYTVGLATGVPTYFISVGDDYQDGDLEGFLDIVNYLLSMDQPQQVLTTSYGQNENTMSRSLANNLCNAYMQLGARGTSILFASGDGGVSGSQSGSCGSKFVPTFPSGCPYLTSVGATTGINPEVAASFSSGGFSNYWGVPSYQQSVVSSYISGLGSTNKGKYNSSGRGFPDVSAQGENVEIVVDGSTEGVDGTSCSSPIFASIVSLLNDELIAAGKSPLGFLNPFLYSDGASAFNDITSGDNPGCNTNGFSAKSGWDPVTGLGTPNYAKLRTAVGF

SEQ ID NO: 28 - protein, 399 aa, Thermococcus sp.
VSAEKVRVIITIDKDFNENSVFALGGNVVARGKVFPIVIAELSPRAVERLKNAKGVVRVEYDAEVQVLKGKSPGAGKPKPSQPAQTIPWGIERIKAPDVWSITDGSSSGVIEVAILDTGIDYDHPDLAANLAWGVSVLRGKVSTKPKDYKDQNGHGTHVAGTVAALNNDIGVVGVAPAVEIYAVRVLDASGRGSYSDIILGIEQALLGPDGVLDSDGDGIIVGDPDDDAAEVISMSLGGLSDVQAFHDAIIEAYNYGVVIVAASGNEGASSPSYPAAYPEVIAVGATDVNDQVPWWSNRGVEVSAPGVDVLSTYPDDSYETLSGTSMATPHVSGVVALIQAAYYNKYGSVLPVGTFDDNTMSTVRGILHITADDLGSSGWDADYGYGIVRADLAVQAVN

SEQ ID NO: 29 - protein, 396 aa, Thermococcus sp.
EKVRVIITIDKDFNENSVFALGGNVVARGKVFPIVIAELSPRAVERLKNAKGVVRVEYDAEVQVLKGKSPGAGKPKPSQPAQTIPWGIERIKAPDVWSITDGSSSGVIEVAILDTGIDYDHPDLAANLAWGVSVLRGKVSTKPKDYKDQNGHGTHVAGTVAALNNDIGVVGVAPAVEIYAVRVLDASGRGSYSDIILGIEQALLGPDGVLDSDGDGIIVGDPDDDAAEVISMSLGGLSDVQAFHDAIIEAYNYGVVIVAASGNEGASSPSYPAAYPEVIAVGATDVNDQVPWWSNRGVEVSAPGVDVLSTYPDDSYETLSGTSMATPHVSGVVALIQAAYYNKYGSVLPVGTFDDNTMSTVRGILHITADDLGSSGWDADYGYGIVRADLAVQAVN

SEQ ID NO: 30 - protein, 572 aa, Thermomyces lanuginosus
APFQVVERLSAPPDGWIKKEKAAPSAQIQFRLGLPQQNSEQLEQLALNIATPGHELYRKHLKRDEIKALVRPLASVSEKVLAWLRDEGVPEDRIHDDGAWIKFTVPVSTAEKLLNTEFFVFHNERTGAEQIRTLEYSVPQDIHSLVKFIQPTTHFSSLGPQVRRVVPLDVLPKLRITLEDCNKKITPDCLKQLYKIGDYVAPEDPRNRIGISGYLEQFARYADFEEFLESYAPDRTDANFTVVSINGGRNDQNSTLDSTEASLDIDYAVTLSYKTQAVYYTTAGRGPLVPDESQPDPNEVSNEPYMEQLQFLLDLPDEELPTVLTTSYGENEQSLPGSYADETCNMFRLLGMRGVSVIFSSGDWGTGIVCKANDGSERIKFDPVYPASCPYVTSVGGTTGVNPERAVEFSSGGFSDRFPRPKYQDEAVRSYLTKLGDHWKGLYNESGRAFPDVAAQADNFVVRDQGQWVSVGGTSASAPVFAAIIANVNAELLKAGKPPLGFLNPWLYGLKGRGFTDVVHGGSTGCPGTVPWTGLPAGHVPYASWNATEGWDPVTGLGTPLYDELVKAALGK

SEQ ID NO: 31 - protein, 397 aa, Thermococcus thioreducens
EKPELVRVIVHVDRGHFNTADVATIGGHVVYQFKLIDAVVVEVPSTAVGRLKKLPGVKMVEFDHKARILAGPPSWLGGGQPSQQIPWGISRVRAPDVWGITDGSGGVIEVAVLDTGVDYDHPDLAGNIAWCVSTLRGRVTTNPAQCKDQNGHGTHVIGTIAALNNDIGVVGVAPGVEIYSIRVLDASGSGSYSDIAIGIEQALLGPDGILDKDGDGIIVGDPDDDAAEVISMSLGGPTDDQYLHDMIITAYNYGVVIVAASGNEGASSPSYPAAYPEVIAVGASDVNDQIASWSNRQPEVSAPGVDILSTYPDDTYETLSGTSMATPHVSGVVALIQAAYYNKYGKVLPVGTFDDMGTNTVRGILHVTADDLGDAGWDIYYGYGIVRADLAVQAAIG

SEQ ID NO: 32 - protein, 549 aa, Polyporus arcularius
KPMARSMKLHESREGIPEGFSLRGAAQPEQTIKLRLALVQSNFAELERKLMDVSTPSSANYGKHLSKAEVQQLVAPTQDSVDAVKSWLKENDISAKTISATGDWLSFEVPVSKANELFDADFSIYTHDETGTEAVRTLSYSIPAELQGHLDLVHPTVTFPNPRGLPPVFTAPIKAEAQNLTSRATIPSSCARTITPACLQAIYNIPSTPATESSNKLAVTGFIEQFANKADLKTFLTRFRTDISSSTSFTLQTLDGGSNPQSSSEAGVEANLDIQYTVGVATGVPTVFISVGEDFQDGDLEGFLDVVNSLLDEDTPPFVMTTSYGQNENTISRNLANNLCNAYAQLGARGVSILFASGDGGVAGSQSASCSKFVPTFPSGCPFMTSVGATQGFSPETAADFSSGGFSNYFAIPDYQTSAVSGYIKALGNTNSGKYNATGRGFPDIATQGVNFEVVVGGQSGTVEGTSCSSPTLASIISLLNDRLIAAGKSPLGFLNPFLYSTGTSALNDITSGSNPGCNTNGFPAKAGWDPVTGLGTPDFNKLLSAVGL

SEQ ID NO: 33 - protein, 548 aa, Ganoderma lucidum
KSTTRNLKLHETRQGAPSGFSHTGSADPNQTLKLRLALVQGNTAELERKLYDVSTPSSANYGKHLSKEEVRQLVAPAQGSVDAVNAWLRENGITAKSTSAAGDWLSFEVPVSKANELFDADFSVFKHDDTGVKAVRTLSYSIPAELQGHLDLVHPTVTFPNPNGHMPVFQAPVKDTDAVQNFSARAVPSSCSNTITPACLQALYNIPSDAATQSSNKLAVTGFIEQYANQVDLAVFLKQYRADISSNTTFALQTLDGGSNSQTNVPGVEANLDIQYTVGIATGVPTVFISVGDQYQDGDLEGFLDVINFLLDEDTPPYVVTTSYGQDEHTISRKLAQNLCNAYAQLGARGVSILFASGDGGVAGSRSNSCSKFVPTFPSGCPYMTSVGATQGVPETAADFSSGGFSNYFGTPDYQASAVKSYLSTLGSTNRGKFNASGRGFPDVATQGVNFEVIVDGEVEGVSGTSAASPMFAAIVALLNDKLIAAGKSPLGFLNPFLYSKGVEALNDITTGSNPGCGTIGFPAKEGWDPVTGLGTPDFQKLASAAGL

SEQ ID NO: 34 - protein, 548 aa, Ganoderma lucidum
KTATRNLKLHETSQGAPSGFSLTGSADPDQTLKLRLALVQGNVAELERRLYDVSTPSSPNYGKHLSKSEVQQLVAPAQDSIDAINAWLKENGISAKTTSATGDWLSFEVPVSKANELFDADFSVYKHHDTGMEVVRTLSYSIPAELQAHLDLVHPTVTFPNPKGHPPVFQAPAMITNDVQNFSAGAVPSSCSSRITPACLQALYNIPSDPATQPSNKLAVTGYIEQYANQDDLAVFLKEYRADMSSNTTFTLQTLDGGVNSQTDEAGIEANLDVQYTVGIATGVPTVFISVGDQYQDGNLEGFLDVVNFLLDEDTPPYVMTTSYGQDEHTMSRKLAQNLCNAYAQLGARGVSILFASGDGGVAGSRSSSCSKFVPTFPSGCPYMTSVGATQGVPETAADFSSGGFSNYFGIPDYQASAVSGYLSALGHTNKGKYNASGRGFPDVSTQGVNFEVMVDGALEGVSGTSAASPTFAAVVALLNDRLIAAGKSPLGFLNPFLYSKGVSALNDITSGSNPGCRTNGFPAKEGWDPVTGLGTPDFQKLASAAGL

SEQ ID NO: 35 - protein, 541 aa, Ganoderma lucidum
KPTARNLRLHETRQGAPSGFSLTGSADPNQTVRLRLALVQGNTGELERKLYDVSTPSSANYGKHLSKAEVQQLVAPAQGSIDAVNAWLKENDITAKTISATGDWLSFEVPVNKANELFDADFSVFKHDDTGMEAVRTLSYSIPAELQGHLDLVHPTVTFPNPKGNLPLFQTPIKSKRDVPADCSNNITPACLQALYNIPSDAATQSSNTLAVTGYIEQYANQQDLTSFLGQFRPDISSNTTFALQTIDGGSNSQNGSDAGGEANLDIQYTVGLATGVPTVFISVGEQYQDGDLGGLLDVINFVLAEDAPPNVITTSYGQNENTISLKLAQNLCNAYAQLGARGVSILFASGDGGVAGSQSDNCTQFVPTFPSGCPYMTSVGATQGVPETAADFSTGGFSNLFSVPDYQAAAVQSYLSALGGTYQGLFNASGRAFPDVSTQGVNFETVVDGSVSGASGTSAASPTFAAIVALLNDRLVAAGKSPLGFLNPFLYSTGASALNDIATGSNPGCGTNGFSAQKGWDPVTGLGTPDFQKLAAAAGL

SEQ ID NO: 36 - protein, 547 aa, Trametes sp.
TPTGRNLKLHEAREDIPTGYSLRGAASPDTTLKLRLALVQNNFAELEDKLYDVSTPSSANYGNHLSKEEVEQYIAPAPESVKAVNAWLTENGLDAHTISPAGDWLAFEVPVSKANELFDADFSVFTHDESGLEAIRTLAYSIPAELQGHLDLVHPTVTFPNPNAHLPVVRSTKPIQNLTGRAIPASCASTITPACLQAIYGIPTTKATQSSNKLAVSGFIDQFANSADLKSFLSTFRKDISSSTTFALQTLDGGQNNQSPSQAGIEANLDIQYTVGLATGVPVTFISVGDNFQDGDLEGFLDIINFLLSESNPPQVLTTSYGQNENTISAKLANQLCNAYAQLGARGTSILFASGDGGVAGSQSSSCRNFVPTFPSGCPFMTSVGATQGVSPETAADFSSGGFSNVFGIPSYQTSAVSGYLSALGNTNSGKFNRSGRGFPDVATQGVNFQIVSGGDTGGVDGTSCASPTFASVISLINDRLIAAGKSPLGFLNPFLYSAAGKAALNDVTSGSNPGCNTNGFPAKAGWDPVTGLGTPNFAKLLTAVGL

SEQ ID NO: 37 - protein, 553 aa, Cinereomyces lindbladii
KPTARNLLVHESLDGVPTGFQLVGPASPDTVLSMRIALVQSDPAGLEAALYDVSTPSSASYGNHLSKAEVEKFVSPTSESVQAVNAWLTENDLTATQLSPAGDWLGFEVPVSKAEDLFGTQFSVFTHEATGMQTVRTLSYSIPSELQGHLDLVFPTINFPDPNANLPVFRHASKKREVTTLNANLTSDAVPSSCADTITPACLQALYGIPTTPATSSTNQLGVSGFIDQFANQADLKTFLQNFRTDISSSTTFSLETLDGGSNSQNRGDAGVEANLDTQYTVGLATDVPTVFISVGEDNQDGSLGGFLDIINFLLDQDSPPQVLTTSYGQNENTVSRAVANNLCNAYAQLGARGTSILFASGDGGVSGSQSASCRTFVPTFPSGCPFMTSVGATTGINPETAATFSAGGFSNYFGTPSYQASAVSSYLAALGSTNSGKFNTSGRGYPDVSTQGENFEIVVSGEEEGVDGTSCASPTFASIISLVNDRLIAAGKPPLGFLNPFLYSTGASAFTDITTGDNPGCNTNGFPAKSGWDPVTGLGTPNFSKLLTAVGL

SEQ ID NO: 38 - protein, 559 aa, Trametes versicolor
AVASTLQLHEARKGIPAGFSLHGAASPDTVLNLRMALVQSNFAGLEERLYDVSTPSSANYGKHLSKAEVEQYVAPRQQSITAVKAWLAANGLSGTSISPAGDWIAAKVPVSKANKLLGAQFSVFNNDATGRQIIRTLAYSIPAELKGHLDLVHPTITFADIKPLVPVVSARRESRVLVDSDLVANTIPASCNAAITPACLQDLYGIPSTPATQSSNQLGVSGFIDQFANQADLATFLTEFRPDVSNSTTFTLQTLDGGQNPQDPSDAGVEANLDTQYTVGVATNVPTTFFSVGDDTKDGIFGFLDLISFLLAAAAPPQVLTTSYGADEGGLSANLVRNLCQAYAQLGARGTSILFSSGDGGVSGSQAEGCVDFVPTFPSGCPFLTSVGATQLTTASGLTVETAAGFSSGGFSNYFPTPPYQQAVVDAYIKKTLVNGTVNEGLFNASGRAFPDVSAVGVDYLIVVGGGTDIVSGTSASSPLFASVIALINDRRLAAGKPPLGFLNPFLYSQAGASALNDVTVGSNPGCASPGFPAAQGWDPVTGLGTPNFAKLLAAALAL

SEQ ID NO: 39 - protein, 541 aa, Paecilomyces hepialid
APAPHGPLVKFGEIRKLPSKWVATGAADANAVIKGQIGIKQNNIQGLQAKLADIADPNSPNYGQWLSKEEVDKYSAPAAADVAAVKAWLASSGITDVTMPTNDWIEFSVPVSKMESLLGSKYEWFVHLETGEKVPRTKEFSVPQNLHDLIDVVTPTTVLYHNINPHTHSSPQAAGAAGLTSPASIKSAYNVDYKGTGNTLVGTTGFLGVGASHTDYANFGQQFSPGLKDFQDVSVNGGSNSGDGSALEGNLDTQYCGALAAPNPSEYLAHAPEGSDNNSFNDAMLAFGNYLNSARNPPSAVSTSYGGEEDGVDASYLDRICNEFMKAGSRGVSIFFSSGDNGVGGNGESSCQNGYYPLWPATCPYVTTVGGTEFDNSGREVVANFEQYNKNIKSPGGGYSNHFAAPSYNKAVTTSYANGLAAPQKQRLNPNGRGYPDISLVSVKYQVNVNNQISQVLGTSASSPSIAGLVGLLNDYRKTQGKPNLGFINPLLYSDKVKPALRDVTSGSNKGCDSVGLPAKTGWDAASGLGSFDFGKLRTLV

SEQ ID NO: 40 - protein, 541 aa, Isaria tenuipes
APAPHGPLVKFGELKKLPSQWVATGAANGDAVIKAQIGIKQNNIKGLQDKLAEISDPNSPSYGQWLSKEEVAKYTAPADADVAAVKAWLSSAGITEVTMPTNDWLEFSVPVSKMESLLGSKYEWFVHLETGEKAPRTKEFSVPQNLHGIIDVVTPTTVLYHNINPNSHGNELSASASGLTSPASIKSAYNVDYKGTGNTLVATTGFLGVGASHNDYLAFGHQFSPGLKDFQDVSVNGGSNSGDGSALEGNLDTQYCGALASPNPSQYLANSPEGSDNNSFNDAMTAFGNYLNSASNPPSAVSTSYGGEEDGVDAGYLDRICNEFMKAGSRGISVFFSSGDNGVGGNGEPSCQNGYYPLWPATCPYVTTVGGTEFDDSGREVVANFEQYNKNVKSPGGGYSNHFPAPDYNKNVTTAYANSLSAAQQQRLNPNGRGFPDISLVSVKYQVSLNGQTKQVLGTSASSPSVAGLVGLLNDYRKTQGKSNLGFLNPLLYSGKVNAALRDVTSGSNKGCDSVGLPAKSGWDAASGLGSFDFAKLRSLI

SEQ ID NO: 41 - protein, 578 aa, Aspergillus tamarii
EAFEKLSAVPKGWHYSSTPEGSTSVCLKIALAQKDAAGFEKRVYEMSDPDHPNYGQHFTTHEEMKRMLLPRDDTVDAVRQWLENGGVTDVRQDSDWINFCTTVDTANKLLNAQFKWYVSDVKHIRRLRTLQYDVPGSVASHVNTIQPTTRFGKITPKKAVTHSKPSQLDVTALAAAVVAKNISHCDSIITPTCLKELYNIGDYQADANSGSKIAFASYLEEYARYADLENFENYLAPWAKGQNFSVITYNGGLNDQNSSSDSGEANLDLQYILGVSAPLPVTEFSTGGRGPLVPDLTQPDPNANSNEPYLEFFQNVLKLDQEQLPQVISTSYGENEQEIPEKYARTVCNLIAQLGSRGVSVLFSSGDSGVGEGCMTNDGTNRTHFPPQFPAACPWVTSVGATYKTTPERATYFSSGGFSDYWARPEWQEEAVSSYLETIGDAFKGLYNASGRAFPDVAAQGMNFAVYDKGTLGEFDGTSASAPAFSAIIALLNDARLRAGKPTLGFLNPWLYKTGRQGLQDITLGASTGCTGRARFGGAPDGGPVVPFASWNATQGWDPVTGLGTPDFAELKKLALAN

SEQ ID NO: 42 - protein, 587 aa, Aspergillus brasiliensis
EIFEKLSGVPNGWRYANNPQGNEVIRLQIALQQHDVTGFEQAVMDMSTPGHADYGKHFRTHEEMKRMLLPSDTAVDSVRDWLESAGVHNIQVDADWIKFHTTVTKANALLDADFKWYVSEARHIRRLRTLQYSIPDALVSHINMIQPTTRFGQIQPNRATMRSKPKHADETFLTAATLAQNTSHCDSIITPSCLKQLYNIGDYQADPKSGSKIGFASYLEEYARYADLEKFEQHLAPNAIGQNFTVVQFNGGLNDQLSTKDSGEANLDLQYILGVSAPLPVTEYSTGGRGELVPDLSSPDPNDNSNEPYLDFLQNILKLNNSDLPQVISTSYGEDEQTIPVPYARAVCNLYAQLGSRGVSVIFSSGDSGVGAACLTNDGTNRTHFPPQFPASCPWVTSVGATSKTSPEQAVSFSSGGFSDLWPRPSYQHAAVQTYLTEHLGNKFSGLFNASGRAFPDVSAQGVNYAVYDKGILGQFDGTSCSAPTFSGVIALLNDARLRAGLPVMGFLNPFLYGAGSKLGGLNDIVTGGSVGCDGRNRFGGTPNGSPVVPFASWNATTGWDPVSGLGTPDFAKLKVVALGESEGDEN

SEQ ID NO: 43 - protein, 582 aa, Aspergillus iizukae
EVFDTLAAVPKGWHYSHTPRADQPISLKIALKQHNVEGFEQAVLDMSTPGHEHYGKHFREHDEMKRMLLPSDATVDAVKDWLLAADVTDYEVDADWINLHTTVQQANELLDTEFAWYVSDVRAVRRLRTLRYSVPDAVAPHINMVQPTTRFGQIHPDRATFRAGSTHFGAHILSAMSAVGDVSSANVTCDDVITPLCLKELYKVDGYRAEAEHGSKIAFASYLEEYARYDDMVRFQEKLAPYAKGENFSVILYNGGVDDQQSTSDSGEANLDLQTIMGLSAPLPITEYITGGRGKLIPDLSQPDPNDNSNEPYLEWIQNVLKHSPEELPQVISTSYGEDEQTIPRGYAESVCNLLAQLGSRGVSVIFSSGDSGVGSACQTNDGTNTTHFPPQFPASCPWVTSVGATSKTHPEEAVYFSSGGFSDLWARPAWQDDAVSTYIESIGGKFAGLYNASGRAFPDVSAQGQNYAIFDKGRLGKMDGTSCSAPAFAGIVSLLNDARLRANRPVLGFLNPWLYGTAREGLNDIVHGGSKGCDGRDRFGGKPNGSPVVPYASWNATPGWDPVSGLGTPNFATLVQVALHD

SEQ ID NO: 44 - protein, 456 aa, Penicillium sp.
APASTAKDSVSSVVKNGVKYTVFEHAATGAKMEFVKNSGICETTPGVNQYSGYLSVGSNMNMWFWFFEARNNPQQAPLAAWFNGGPGCSSMIGLFQENGPCHFVNGDSTPSLNEYSWNNYANMLYVDQPIGVGFSYGTDDVTSTVTAAPYVWKLLQAFYAQFPEYESRDFAIFTESYGGHYGPEFASYIQDQNAAIKAGSVSGENINLVALGVNNGWIDSTIQEKAYIDFSYNNSYKQLIDDSQRTSLLSAYNDQCLPAIQKCTSSGSNSDCKNADSVCYNQIEGPISSSGDWDVYDIREPSNDPYPPSTYSTYLSNADVVKAIGAQSSYQECPNGPYNKFTSTGDNPRSFLSTLSSVVKSGINVLVWAGDADWICNWLGNYEVANAVDFSGHTDFSAKDLAPYTVNGTEKGLFKNVDNFSFLRVYGAGHEVPYYQPDTALQVFEQILQKKPIFST

SEQ ID NO: 45 - protein, 456 aa, Aspergillus denticulatus
STASAAKDSVSSIVKNGVKYTVFEHAATGAKMEFVKNSGICETTPGVNQYSGYLSVGDNMNMWFWFFEARNNPQQAPLAAWFNGGPGCSSMIGLFQEHGPCHFVNGEDTPSLNEYSWNNYANMLYVDQPIGVGFSYGTDDVTSTVTAAPYVWKLLQAFYAQFPEYESRDFAVFTESYGGHYGPEFASYIQQQNAAIKAGTVSGENINLIALGVNNGWIDSAIQEKAYIDFSYNNTYKQLISSSDRTRLLSVYNSQCLPAIQKCTSTGTTAACRNADSVCYNNIEGPISSSGDWDVYDIREPANDPYPPATYSTYLADPDVVKAIGAQTSYQECPNGPYNKFASTGDNPRSFLSTLSNVVKSGINVLVWAGDADWICNWLGNYEVANAVDYPGQSEFEAKDLAPYTVNGAEKGMFKNVDNFSFLRVYGAGHEVPYYQPETALQVFQQTLQKKPIFST

SEQ ID NO: 46 - protein, 456 aa, Hamigera sp.
APASTAKDTLSSIVKNGVTYNVFEHADSGAKIEFVKNSGICETTPGVNQYSGYLSVGDNMNMWFWFFEARNNPQKAPLAAWFNGGPGCSSMIGLFQENGPCHFVNGENTPSLNEYSWNNYANMLYVDQPIGVGFSYGTDDVDSTVTAAPYVWKLLQAFYAQFPEYESRDFAIFTESYGGHYGPEFAHYIQQQNAAIKSGSVKGENINLIGLGVNNGWIDSAIQEKAYIDFSYNNSYKQLIDFSQRTSLMRAYKNQCLPAIQKCYQTGTNADCTDASSVCYNNIEGPISSSGDWDVYDIREPSNDPYPPKTYSSYLSDPKVVKAIGARTNYKECPNGPYNKFSTTGDNPRSFLSTLSDVVKSGINVILWAGDADWICNWLGGYGVANAVDYPGHAQFRAKALAPYTVNGTEKGQFKTVDNFQFLKVYGAGHEVPYYQPETALQVFEQILQKKPIHST

SEQ ID NO: 47 - protein, 456 aa, Penicillium janthinellum
APASTAKDTVSSVVKDGVTYTVFEHAATGAKMEFVKNSGICETTPGVNQYSGYLSVGSNMNMWFWFFEARNNPQQAPLAAWFNGGPGCSSMIGLFQENGPCHFVNGESTPSLNENSWNNYANMIYIDQPIGVGFSYGTDRVTSTVTAAPYVWKLLQAFYAQFPEYESRDFAIFTESYGGHYGPEFASYIEQQNAAIKAGSVTGQNVNIVALGVNNGWIDATIQEKAYIDFSYNNSYQQIIDSSTRDSLLDAYNNQCLPALQQCAQSGSNSDCTNADSVCYQNIEGPISSSGDFDVYDIREPSNDPYPPKTYSTYLSDPTVVKAIGARTNYQECPNGPYNKFASTGDNPRSFLSTLSSVVQSGINVLVWAGDADWICNWLGNYAVANAVDFPGNAQFSAMDLAPYTVNGVEKGQFKTVDNFSFLKVYGAGHEVPYYQPDTALQVFKQILQKKPISST

SEQ ID NO: 48 - protein, 456 aa, Penicillium vasconiae
APASTAKDSVSSVVKNGVKYTVFEHAATGAKMEFVKNSGICETTPGVNQYSGYLSVGSNMNMWFWFFEARNNPQQAPLAAWFNGGPGCSSMIGLFQENGPCHFVNGDSTPSLNEYSWNNYANMLYVDQPIGVGFSYGTDDVTSTVTAAPYVWKLLQAFYAQFPEYESRDFAIFTESYGGHYGPEFASYIQEQNAAITAGSVSGQKINLIALGVNNGWIDSTIQEKAYIDFSYNNSYQQLIDDSQRTSLLSAYNKQCLPAIQKCTQTGSNSACQNAANVCYNNIEGPISSSGDWDVYDIREPSNDPYPPSTYSTYLANSDVVKAIGAQSSYQECPNGPYNKFASTGDNPRSFLSTLSSVVKSGINVLVWAGDADWICNWLGNYEVANAVDFSGHAEFSAKDLAPYTVNGAEKGMFKNVDNFSFLKVYGAGHEVPYYQPETALQVFEQILQKKPISST

SEQ ID NO: 49 - protein, 454 aa, Hamigera paravellanea
APSLRDKRSFVERDGVTYTVFEHAATGAKMEFVQNSGICETTPGVNQYSGYLSVGDNMNMWFWFFEARNNPTAAPLAAWFNGGPGCSSMIGLFQENGPCHFVNGESTPSLNEYSFNNYANVLYVDQPIGTGFSYGTDDVTSTVTAAPYVWKLLQAFYAQFPEYESRDFGIFTESYGGHYGPEFASYIQEQNAAIKAGSVSGDNINLVALGINNGWFDAGIQEKAYIDFSYNNSYRQIISSSQRSSYLDAYNHDCLPAIESCASSGTNSACKNAESVCYNGIEGPISSAADFDVYDVRQPSNDPYPPATYSTYLQSASVRKAIGARTKYQECPNGPYNKFETTGDNSRSFLSTLSDVVNTGITVLVWAGDADWICNWVGGHAVADAVTFARQKTFQAKPLEPYTVNGTEKGRFKTVDNFTFLRVYEAGHEVPYYQPETALQVFVQTMQKKAIFST

SEQ ID NO: 50 - protein, 453 aa, Talaromyces variabilis
AAVPQDKRSIVKRDGVTYNVFEHAATGAKMEFVKNSGICETTPGVNQYSGYLSVGDNMNMWFWFFESRNNASGAPLAAWFNGGPGCSSMIGLFQENGPCHFVNGEKKPSLNKYSFNEYANVLYVDQPIGVGFSYGTDDVTSTESAAPYVWKLLQAFYAQFPQYESRDFGIFTESYGGHYGPEFAHYLQQQNEGVKNGSVDGENINLVALGINNGWFDTQLQEGAYIDYAYSNNYKKIIDSSQRSSLEDSLKSDCLPAVKQCLSSGSDSDCENASDTCGQIESSIQQAADFDVYDVREPSNDPYPPSTYSDYLADSSVVKAIGAKSTYKECPNGPYYKFSSTGDNTRSFLSELSSVVQSGIQVLVWAGDADWICNYMGVQRVADAVEFDGSSQFSNATLKPYTVNGTKKGEYKNVDNFSYLRVYGAGHEVPYYQPAVALQVFKQTMQQQAIKST

SEQ ID NO: 51 - protein, 456 aa, Penicillium arenicola
APATHLQDKRSIVERDGVNYTVFEHAATGAKLEFVTNSGICETTSGVNQYSGYLSVGTNMNMWFWFFESRNSPSTAPLAAWFNGGPGCSSMIGLFQENGPCQFYDGASTPSLNPYSFNEYANMIYIDQPIGVGFSYGTDDVTSTVTAAPYVWKLIQAFYASFPAYESREFGLFTESYGGHYGPEFAYYIQQQNAAIASGTVTGDTIDIVALGINNGWIDSALQEKAYIEYSYNNSYKQIITSSQRTSYLSTYTNDCLPAINKCTTGGSNSACSNAADVCYNDIESPIMSDADFDVYDIRQPSNDAYPPETYVTYLQTSSVVKAIGASSTYQECPDAPYNKFATTGDNDRSFLATLSTVVQSGITVLLWAGDADWICNWVGNQYVADAVTWSGQSSFAAQTLTPYTVNGSEVGTFKTLDNLSFLRVYEAGHEVPYYQPATALQAFIQTMQKKALSST

SEQ ID NO: 52 - protein, 354 aa, Nocardiopsis kunsanensis
APAPQNPTEPAEATTMAEALERDLGLNEAEATDLIDAQESALDVDAEATEAAGEHYGGSLFDTETHDLTVLVTDSAAVPGVEAAGAEAAVVEHGVEGLDDLISDLDSAGAQEGVVGWYPEVENDTVVIETLEGADADVDALLSSAGVDPADVRVETTDEAPEVYANIVGGDAYTIGGSSRCSVGFPASDSYGQPGFVTAGHCGTTGSSVSIGNGSGVFSQSVFPGNDAAFVRGTSNFSLTNLVNRYNSGSDVAVSGSTQAPIGSQVCRSGSTTGWHCGTIQARGQTVSYPQGTVRDLTRTSVCAEPGDSGGSFISGSQAQGVTSGGSGNCSWGGTTYYQEVNPMLNSWNLNLST

SEQ ID NO: 53 - protein, 425 aa, Streptomyces parvulus
GTAPSPAAPTAAESLRADAAPPALLRAMERDLGLGREQAERRLGNEAEAGAVAGRLRADLGGDFAGAWVRGAESGTLTVATTDAADVPAIEARGAVAEVVRHSLADLGAAKSRLDRAAAHRDTAEAPVRYVDVRTNTVTVQAVRPSAARALLAAAGVDAGLARVETSAERPRPLYDLRGGEAYYINNSGRCSVGFPVTKGTQQGFATAGHCGRAGASTSGANRVAQGTFQGSVFPGRDMAWVAANSQWTATPYVSGAGGQNVQVAGSTQAPVGASVCRSGSTTGWHCGTIQQHDTSVTYPEGTITGVTRTTVCAEPGDSGGSYISGSQAQGVTSGGSGNCGSGGTTFFQPINPLLQNYGLTLKTTGGGGEDPGEPGEPGGTWAAGTVYRPGDTVTYGGATYRCLQGHQAQRGWEPANVPALWQRV

SEQ ID NO: 54 - protein, 350 aa, Saccharopolyspora endophytica
LTATIADPAGPPVSPELVTAMQRDLGLTADQAVARLGQEAVAARADSALRDALAGSYGGSYFDANLGKLVVGTTDAAKSDEVRAAGAEPRQVDASERQLDGIVEALNGRGAQVPAAVTGWYADVRENAVVVTTQPGTAEQATGFVRDAQVPQESVRVWESPAQPETYADVVGGYAYYTASGARCSMGFAVQGGFVTAGHCGAPGESTTQPTGYFAGSSFPGNDYAFVNTGTDDTGYPLVYNYSSGYVRVSGSAEAPLGSSICRSGSTTGWHCGTVLAKNQSVRYQEGTVSGLTRTNVCAEPGDSGGSFISGNQAQGMTSGGWGDCRTGGETYYQPVREALSAYGLTLLTQ

SEQ ID NO: 55 - protein, 355 aa, Luteus cellwall
ASGPLPQSPSPDSDVATTMAEALERDLNLTSTEAQELLTAQEAAFEADEAAAQAAGDAYGGSVFDTETLDLTVMVTDAAAVQAVEATGAKADVVSYGIDGLDTIIDDLNEADAPEGVVGWYPDIDSDTVVLEVLEGSGADVDALLAEAGVDASAVKVESTTEQPELYADIIGGLAYYMGGRCSVGFAATNASGQPGFVTAGHCGRVGTQVTIGNGRGVFERSVFPGNDAAFVRGTSNFTLTNLVSRYNSGGYATVSGSSVAPIGSSVCRSGSTTGWRCGTIQARGQTVTYPQGTIYNMTRTSACAEPGDSGGSFISGTQAQGVTSGGSGNCSWGGTTFYQEVNPMLNSWNLRLRT

SEQ ID NO: 56 - protein, 406 aa, Saccharothrix australiensis
GPPTTHQEESGLIAAMARDFKITPDQARARLVREAKAATTEQSLKSRLGGHYAGAWLNEGATELVVAVTDAAQAKVVEDAGATPKVVQRSQIQLDELKAKLDANKNAPKDVPAWYVDVKTNSVVVLARNTASAKAFARASGLSEADVRIEQSTEDPRPLIDVIGGNAYYMGSGGRCSVGFSVNGGFVTAGHCGRVGTTTTQPSGTFAGSTFPGRDYAWVRVSSGNTMRGLVNRYPGTVPVKGSNESSVGASVCRSGSTTGWHCGTIQQKNTSVTYPEGTISGVTRTNACAEPGDSGGSWLTGDQAQGVTSGGSGNCSSGGTTYFQPVNPILQAYGLQLVIEGGPTGTTGPTTTSSNPGGTTWQPGVAYTAGTTVTYEGVGYECLQGHTSQIGWEPSAVPALWERVG

SEQ ID NO: 57 - protein, 346 aa, Nocardiopsis baichengensis
DAFPEGTEPLAEAIERDLGVASGQADELLTAEESARSLEKEAEKAAGEAFAGAVFDTETHELTVSVADPSAVEAVEATGAETRVVEASQDELDAAMADLDAASEDGVSEEVTGWHVDLESNTVVVEALEGSEDAAEDLIADAGLDSAPVVVEKADAQPETFGAIVGGDAYYPGNSRCSIGFSVRGGFVTAGHCGSTGTSVSGSAGESGRVAGSVFPGRDMGYVRANSGWTPSPYVNNYRGGRVAVRGSNEASVGASVCRSGSTTGWHCGTIQAKNQTVNYPQGTVRGLTRTTACAEPGDSGGSWLSGNQAQGVTSGGSGNCSWGGTTFFQPVNPILSQWGLSLTTT

SEQ ID NO: 58 - protein, 353 aa, Streptomyces sp.
NDTLTERADAAVAELPAGVLDAMERDLGLSEQEAGLQLVAQYDASLLGETLSADLDAYAGSWLADGTDLVVATTDRAEAAQITEAGAKVEIVDHTLTELESVKAALDEAAESYDTTDAPVWYVDITTNDVVLLTSDTAEAKGFVEAAGVDAGAVSIQTSDEQPQAFYDLVGGDAYYMGGGRCSVGFSVTQGSTPGFATAGHCGTVGTSTTGFNQAAQGTFEESSFPGDDMAWVSVNSNWNTTPTVNDGAVTVSGSTQGAVGASICRSGSTTGWHCGTIEQHNTSVTYPEGTITGVTRTSVCAEPGDSGGSYISGSQAQGVTSGGSGNCTSGGTTYHQPINPLLSAYGLDLVTG

SEQ ID NO: 59 - protein, 353 aa, Actinoalloteichus spitiensis
DTPSPDGADATVASPEMLSAMQRDLGLTEQEALTRVAVEATAVETEDELRASLGPAFGGAHFDGDTNTLVVGVTSAAKADEVRAAGATPEVVAFSADTLDGVVSTLNETSEVPDGVTGWYVDTADNTVVVTTALGSGEAAADFVAESGVNADAVTVVESTEQPRTLYDIIGGDAYYFGGSRCSVGFSVSVGYVTAGHCGGVGTATQGYNRVSSGQVAGSVFPGSDMGYVRTNANWTPRPLVNRYSGGATVTVSGSNEAAVGASICRSGSTTGWRCGTVQAKNQTVFYAQGAVSGLTRTNACAEGGDSGGSWLSGSQAQGVTSGGSGNCTWGGTTYFQPLNPILSRWGLSLTRG

SEQ ID NO: 60 - protein, 338 aa, Byssochlamys verrucosa
FPAAVDVKRAPSSLGITLSQVSNTLIKAVVQNTGRGEVSFIHLNFFKDDAPVKKVAVYRNGSEVQFEGIQRRYKSTGLTRDAFTTLAPGKTAEDVFDIASTCDLISGGPVTIRSEGVVPYATANGIDIAGYIPYSSNELTIDVDGAIASTVSKAIAPLNRRTNISSCSGSEQSTLTMALKNAASLAHAAADAAESGSASKFSEYFKTTASSTRKTVAARLRAVAQEASSSSSGSTTYYCNDAYGYCTTNVLAYTLPSHNTIATCDLYYTNLSALTRTCHAQDQATTSLHEFTHAPGVYSPGTDDLAYGYASSTSLSSSQAVMNADSYALYANAIYVGC

SEQ ID NO: 61 - protein, 339 aa, Hamigera terricola
SPVNVNVGREELPALDVTLSQIGNTQIKAVVKNTGSEDVTFMHLNFFTDSAPVKKVSVFQNNTEVEFQGILRRVKYTDVSTDSVTTLAPGASIEDVFDIATTTDLASGGAVTVKTDGFVPILASAENKVTGYARYTSNELHLDVDGPSAATVSKAIAPLDRRTRLSSCSGSRSSALQTALRNTVSLANAAANAARSGSASKFSEYFKTTSSSVRSTVAARLSAVASEASSTSSGSTTYYCNDPYGYCSTDVLAYTLPSYNIIANCDIYYSYLPALTGSCHAQDQATTTLHEFTHAPGVYSPGTEDYGYGYNAATSLSSSQAVLNADSYALYANAIYLGC

SEQ ID NO: 62 - protein, 334 aa, Aspergillus tamarii
IPVEVPASAPGLDVTLSQVGNTRIKAVVKNTGSEEVTFVHLNFFKDAAPVQKVSLFRNATEVQFQGIKQRLITEGLSDEALTTLAPGATIEDEFDIASTSDLSEGGTITINSNGLVPITTENKVTGYIPFASNELSIDVDAAEAATVSQAVKILDRRTKVTSCSGSRSSALQTALRNTVSLARAAASAAQSGSSSRFQEYFKTTSSSTRSTVAARLNAVANEAASTASGSTTYYCSDVYGYCSSNVLAYTLPAYNIIANCDLYYSYLPALTSTCHAQDQATTTLHEFTHAPGVYSPGTDDLGYGYSAATALSASQALLNADTYALFANAVNLNC

SEQ ID NO: 63 - protein, 334 aa, Aspergillus niveus
LPAKTGEQLQKLDVALSQVDNTLIKAVVKNTGSEDITFVHLNFFRDTAPVKKVSLFRNTTEVPFHGIKQRLRSDGLSADALTVLAPGESIEDEFDIAATSDLSEGGSITISADGFVPIASGNKITGYVPFSSNELSVEVDAAQAASVASAVKPLDRRTKVASCSGSRSSALTQALRNTVSLANAAASAAQSGSSTRFQEYFKTTSSSVRSSVAARFRAVASEASSTSAGSTTYYCTDVYGYCSSNVLAYTLPAYNIIANCDIYYTYLPALTSTCHAQDQATTTLHEFTHAPGVYSPGTDDLGYGYDAATALSSSQALNNADSYALFANAVNLNC

SEQ ID NO: 64 - protein, 372 aa, Penicillium sclerotiorum
IPTGGKKSSFSVDQVAIPATKTKNFADTYARAISKFGGNVPSHVRAAAQQSGAATTTPEANDEEYLTPVNVGGTTLNLDFDTGSADLWVFSEQLPSSEQSGHSVYKPNNGTKLSGATWSISYGDGSSASGDVYKDTVSVGPVKATGQAVEAASKISAQFTRDSNNDGLLGLAFSSINTVKPKAQTTFFDTVKSSLASPLFAVTLKHNAPGTYDFGFVDSSKYTGSLAYTDVDNSQGFWEFTADSYKVGSQSGSSIKGIADTGTTLLLLDDEVVSAYYKQVSGASDSQSAGGYTFDCSADLPDFTVTISGYDAVVPGSLINYAPVSDGSSTCLGGIQSNSGIGFSIFGDIFLKSQYVVFDSNGPRLGFAAQSS

SEQ ID NO: 65 - protein, 371 aa, Penicillium bilaiae
VPTGGKKSFSINQVAIPATKTKNFAGNYAHAIAKYGGNVPSHVEAAAQQSGAATTTPESNDEEYLTPVNVGGTTLNLDFDTGSADLWVFSAELPSAEQSGHALYKPSNGTKLSGASWSISYGDGSSASGDVYKDTVSVGSVKATGQAVEAASKISAQFTKDKNNDGLLGLAFSSINTVKPKAQTTFFDTVKSSLASPLFAVTLKHNAPGTYDFGFIDKSKYTGSLAYADVDNSQGFWEFTADSYSVGSSKGSSIKGIADTGTTLLLLDDEVVSAYYKQVQGAQQDSSAGGYTFDCSSKLPDFTVTISGYDAVVPGDLINFAPASEGSSTCLGGIQSNSGIGFSIFGDIFLKSQYVVFDSNGPRLGFAAQSS

SEQ ID NO: 66 - protein, 373 aa, Penicillium antarticum
SPLVTPRKGFTINQETRAVTKSKTVNLPGVYAQALSKYGATVPQHVHAAAVSGSAVTTPEESDVEYLTPVNVGGTTLNLDFDTGSADLWVFSSELTSSQQSGHSIYKPSSSATKLSGSSWSISYGDGSSASGDVYKDTVTVGGVKATGQAVEAASKISSAFLQDVNNDGLLGLAFSSINTVSPRAQTTFFDTVKSQLDSPLFAVTLKHNAPGSYDFGYIDKSKYTGSLTYANVDDSQGFWSFTASSYKIGTTTGGSITGIADTGTTLLLLPDSVVSAYYKKVSGSQNSNYYGGYVFPCSATLPDFTVTINGYNAVVPGNLINFAQATTGSSTCYGGIQSNSGIGFSIFGDIFLKSQYVVFDSEGPRLGFAAQA

SEQ ID NO: 67 - protein, 370 aa, Penicillium sumatrense
VPTNNVASKFSVNQVSRPATKTTNFAANYGRALSKYGAGVPSHVEAAAAASGSAVTTPESNDVEYLTPVSIGGTTLNLDFDTGSADLWVFSTELSSSEQSGHSVYNPSKSGKKISGASWDISYGDGSGASGDVYTDTVTVGGVTASKQAVEAAKQISSQFQQDTDNDGLLGLAFSSINTVSPTPQKTFFDNVKSSLSQPLFAVALKHNAPGVYDFGFIDSSKHTGSIAYTSVDSSQGFWSFTVDGYKVGSKSGAGFDGIADTGTTLLLLDDSVVSAYYSQVSGAKNDNNAGGYVFDCSADLPDFSVTIGSYTATVPGSLINYGDSGDNSCIGGIQSNSGIGFSIFGDIFLKSQYVVFNANGPKLGFAPQA

SEQ ID NO: 68 - protein, 384 aa, Trichoderma lixii
LPTEGQKTASIEVTYNKNYVAHGPTALFKAKRKYGAPISDNLRAAVAAKHSLTKRQTGSANTNPSDSADDEYITSVSIGTPAQVLPLDFDTGSSDLWVFSSETPKSSASGHVTYSPSKSSTAKKLSGSTWSITYGDHSSSSGDVYTDVVSIGGFSVKTQAIESATKVSTQFVQDTVISGLVGLGFDVGNTVKPRAQKTWFSNAASSLAEPLFTADLRHQETGSYNFGFIDNSLAKGTIGYTPADGSEGYWGFTATGYSVGGAKLGRSSITGIADTGTTLLLLPDNVVDAYYNNVESAQYDDSQEGVVFDCSEDLPSFSFGVGGQTITISGDLLNLTPIEEGSSTCFGGLQSSADIGINIFGDVALKAALVVFDLGNERLGFAQK

SEQ ID NO: 69 - protein, 384 aa, Trichoderma brevicompactum
LPTEGQKTASVEVTYNQNYAAHGPTQLYKAKRKYGAPISDNLKAIVANRKALIKRQTGSAPNHPSDSADDEYITNVSIGTPAQVLPLDFDTGSSDLWVFSSETPKSSASGHTIYTPSKSSTSKKLSGATWSIEYGDKSTSSGDVYTDKVTVGGFSVSTQAVESATKVSAQFVQDTANSGLLGLAFDSINTVSPRQQKTWFSNAANSLAQPLFTANLNHQATGSYNFGFIDTSLASGPINYVPVDNSQGFWGFTASGYSVGGGKLNRSSLSGIADTGTTLLLLPDAVVNAYYANVESAEYDDEQEGVVFDCSEDLPTFSFGVGSGTITIPGDLLNLTPIDSSGQTCYGGLQSSSDIGINIFGDVALKAALVVFDLGNERLGWAQK

SEQ ID NO: 70 - protein, 379 aa, Penicillium cinnamopurpureum
IPTGVPNRKGFTVNQQVRPVTNGTKSKTLNLPAIYANALSKYGVAVPANIKAAAESGTATTTPEDNDIEYLTPVDVGGTTLNLDFDTGSADLWVFSSELPSSESSGHSIYKPSQSGKKLDGYSWKISYGDSSSASGDVYTDTVTVGGVTADGQAVEAAKKISQQFVQDKNNDGLLGLAFSSINTVQPKAQTTFFDTVKDQLDSPLFAVTLKHNAPGSYDFGFIDKSKYTGSLTYADVDKSDGFWAFTADGYSVGSGSSSSSRIKGIADTGTTLLLIDDEIVSAYYKQVDGAQESYSVGGYTFDCSTKLPDFNIKIGDYTAVIPGDVINYAPVQQGSSTCFGGIQSNSGLPFSIFGDIFLKSQYVVFDANGPRLGFAAQA

SEQ ID NO: 71 - protein, 350 aa, Bacillus lichenformis
AQPAKNVEKDYIVGFKSGVKTASVKKDIIKESGGKVDKQFRIINAAKAKLDKEALKEVKNDPDVAYVEEDHVAHALAQTVPYGIPLIKADKVQAQGFKGANVKVAVLDTGIQASHPDLNVVGGASFVAGEAYNTDGNGHGTHVAGTVAALDNTTGVLGVAPSVSLYAVKVLNSSGSGSYSGIVSGIEWATTNGMDVINMSLGGASGSTAMKQAVDNAYARGVVVVAAAGNSGSSGNTNTIGYPAKYDSVIAVGAVDSNSNRASFSSVGAELEVMAPGAGVYSTYPTNTYATLNGTSMASPHVAGAAALILSKHPNLSASQVRNRLSSTATYLGSSFYYGKGLINVEAAAQ

SEQ ID NO: 72 - protein, 360 aa, Bacillus subtilis
FSNMSAQAAGKSSTEKKYIVGFKQTMSAMSSAKKKDVISEKGGKVQKQFKYVNAAAATLDEKAVKELKKDPSVAYVEEDHIAHEYAQSVPYGISQIKAPALHSQGYTGSNVKVAVIDSGIDSSHPDLNVRGGASFVPSETNPYQDGSSHGTHVAGTIAALNNSIGVLGVAPSASLYAVKVLDSTGSGQYSWIINGIEWAISNNMDVINMSLGGPTGSTALKTVVDKAVSSGIVVAAAAGNEGSSGSTSTVGYPAKYPSTIAVGAVNSSNQRASFSSAGSELDVMAPGVSIQSTLPGGTYGAYNGTSMATPHVAGAAALILSKHPTWTNAQVRDRLESTATYLGSSFYYGKGLINVQAAAQ

SEQ ID NO: 73 - protein, 548 aa, Trametes cf versicol
TPTARNLKLHESREEIPAGFSLSGAASPDTTLKLRLALVQSNFAELEDKLYDVSTPSSANYGQHLSKEEVEQLVAPSAESVNAVNAWLTENGLTAQTISPAGDWLAFEVPVSKANELFDADFSVFTHDESGLKAVRTLAYSIPAELQGHLDLVHPTITFPNPNSHLPVVRSPVKPVQNLTSRAVPASCASTITPACLQALYGIPTTKATQSSNKLAVSGFIDQFANSADLKTFLGKFRTDISSSTTFTLQTLDGGSNSQSSSQAGVEANLDIQYTVGLASAVPTIFISVGDDFQDGDLEGFLDIINFLLNESAPPQVLTTSYGQNENTISAKLANQLCNAYAQLGARGTSILFASGDGGVSGSQSSSCSKFVPTFPSGCPFMTSVGATQGINPETAADFSSGGFSNVFARPSYQSTAVSSYLTALGSTNSGKFNTSGRAFPDIATQGVDFEIVVSGRTEGVDGTSCASPTLAAIISLLNDRLIAAGKSPLGFLNPFLYSAAGTAALTDITSGSNPGCNTNGFPAKAGWDPVTGLGTPNFAKLLTAVGL

SEQ ID NO: 74 - protein, 439 aa, Bos taurus
MAKEYFPFTGKIPFEGKDSKNVMAFHYYEPEKVVMGKKMKDWLKFAMAWWHTLGGASADQFGGQTRSYEWDKAECPVQRAKDKMDAGFEIMDKLGIEYFCFHDVDLVEEAPTIAEYEERMKAITDYAQEKMKQFPNIKLLWGTANVFGNKRYANGASTNPDFDVVARAIVQIKNSIDATIKLGGTNYVFWGGREGYMSLLNTDQKREKEHMATMLGMARDYARAKGFKGTFLIEPKPMEPSKHQYDVDTETVIGFLKAHGLDKDFKVNIEVNHATLAGHTFEHELACAVDAGMLGSIDANRGDAQNGWDTDQFPIDNFELTQAMLEIIRNGGLGNGGTNFDAKIRRNSTDLEDLFIAHISGMDAMARALMNAADILENSELPAMKKARYASFDSGIGKDFEDGKLTFEQVYEYGKKVEEPKQTSGKQEKYETIVALHCK

SEQ ID NO: 75 - protein, 591 aa, Saccharomyces cerevisiae
MLCSVIQRQTREVSNTMSLDSYYLGFDLSTQQLKCLAINQDLKIVHSETVEFEKDLPHYHTKKGVYIHGDTIECPVAMWLGALDLVLSKYREAKFPLNKVMAVSGSCQQHGSVYWSSQAESLLEQLNKKPEKDLLHYVSSVAFARQTAPNWQDHSTAKQCQEFEECIGGPEKMAQLTGSRAHFRFTGPQILKIAQLEPEAYEKTKTISLVSNFLTSILVGHLVELEEADACGMNLYDIRERKFMYELLHLIDSSSKDKTIRQKLMRAPMKNLIAGTICKYFIEKYGFNTNCKVSPMTGDNLATICSLPLRKNDVLVSLGTSTTVLLVTDKYHPSPNYHLFIHPTLPNHYMGMICYCNGSLARERIRDELNKERENNYEKTNDWTLFNQAVLDDSESSENELGVYFPLGEIVPSVKAINKRVIFNPKTGMIEREVAKFKDKRHDAKNIVESQALSCRVRISPLLSDSNASSQQRLNEDTIVKFDYDESPLRDYLNKRPERTFFVGGASKNDAIVKKFAQVIGATKGNFRLETPNSCALGGCYKAMWSLLYDSNKIAVPFDKFLNDNFPWHVMESISDVDNENWIAIIPRLSP

SEQ ID NO: 76 - protein, 444 aa, Bacillus subtilis
ETANKSNELTAPSIKSGTILHAWNWSFNTLKHNMKDIHDAGYTAIQTSPINQVKEGNQGDKSMSNWYWLYQPTSYQIGNRYLGTEQEFKEMCAAAEEYGIKVIVDAVINHTTFDYAAISNEVKSIPNWTHGNTQIKNWSDRWDVTQNSLLGLYDWNTQNTQVQSYLKRFLERALNDGADGFRFDAAKHIELPDDGSYGSQFWPNITNTSAEFQYGEILQDSASRDAAYANYMDVTASNYGHSIRSALKNRNLGVSNISHYAYDVSADKLVTWVESHDTYANDDEESTWMSDDDIRLGWAVIASRSGSTPLFFSRPEGGGNGVRFPGKSQIGDRGSALFEDQSITAVNRFHNVMAGQPEELSNPNGNNQIFMNQRGSHGVVLANAGSSSVSINTPTKLPDGRYDNKAGAGSFQVNDGKLTGTINARSVAVLYPDDIEIRCNTFFQ

SEQ ID NO: 77 - protein, 476 aa, Saccharomycopsis fibuligera
QPVTLFKRETNADKWRSQSIYQIVTDRFARTDGDTSASCNTEDRLYCGGSFQGIIKKLDYIKDMGFTAIWISPVVENIPDNTAYGYAYHGYWMKNIYKINENFGTADDLKSLAQELHDRDMLLMVDIVTNHYGSDGSGDSIDYSEYTPFNDQKYFHNYCLISNYDDQAQVQSCWEGDSSVALPDLRTEDSDVASVFNSWVKDFVGNYSIDGLRIDSAKHVDQGFFPDFVSASGVYSVGEVFQGDPAYTCPYQNYIPGVSNYPLYYPTTRFFKTTDSSSSELTQMISSVASSCSDPTLLTNFVENHDNERFASMTSDQSLISNAIAFVLLGDGIPVIYYGQEQGLSGKSDPNNREALWLSGYNKESDYYKLIAKANAARNAAVYQDSSYATSQLSVIFSNDHVIATKRGSVVSVFNNLGSSGSSDVTISNTGYSSGEDLVEVLTCSTVSGSSDLQVSIQGGQPQIFVPAKYASDICS

SEQ ID NO: 78 - protein, 487 aa, Debaryomyces occidentalis
QPIIFDKRDVGSSADKWKDQSIYQIVTDRFARSDGSTTADCLVSDRKYCGGSYKGIIDKLDYIQGMGFTAIWISPVVEQIPDNTAYGYAYHGYWMKNIDELNTNFGTADELKQLASELHSRSMLLMVDVVYNHYAWNGDGSSVDYSSFTPFNQQSYFHDYCLITNYNDQTNVEDCWEGDTEVSLPDLSTEDNEVIGVFQTWVSDFVQNYSIDGLRIDSAKHVDTASLTKFEDASGVYNLGEVYQGDPTYTCPYQSYMKGVTNYPLYYPVYRFFSDTSATSSELTSMISTLQSSCSDVSLLGNFIENHDQVRFPSVTSDTSLIKNAMAFIILGDGIPIIYYGQEQGLNGGSDPANREALWLSGYNTDSEYYELISKLNQIRNQAIKKDSAYSTYKSSVVSSSDHYIATRKGSDANQLISIFNNLGSNGSQDITVSNTGYSSGDKVIDIISCNSVSAGDFGSLSVSISGGMPQVYAPSSVLSGSGICNQ

SEQ ID NO: 79 - protein, 487 aa, Debaryomyces occidentalis
KPIFLSKRDAGSSAAAAWRSESIYQLVTDRFARTDGSTSATCNTGDRVYCGGTFQGIIDKLDYIQGMGFTAIWISPVVEQIPDDTGYGYAYHGYWMKDIYAINSNFGTADDLKNLSNELHKRNMKLMVDIVTNHYAWNGAGSSVAYSNYNPFNQQSYFHDYCLITNYDDQTNVEDCWEGDNTVSLPDLRTEDSDVSSIFNLWVAELVSNYSIDGLRIDSAKHVDESFYPSFQSAAGVYLLGEVYDGDPAYTCPYQNYMSGVTNYPLYYPMLRFFQGTSNSVDELNAMISSLESDCKDITLLGNFIENHDQPRLPSYTSDSALIKNAIAFNLMSDGIPIIYYGQEQGYSGSSDPNNREALWLSGYSTSNGYYKLISSVNQIRNQAIYKDSKYTTYWSDVLYASGHVIALQRGADDQRIVSVFNNLGSSGSQTVTFSTKYSGGEKVVDVLTCQTSYANSDSTLTVSISGGAPRIYAPASLIANSGICNF

SEQ ID NO: 80 - protein, 570 aa, Lipomyces kononenkoae
MCGSTLSASLYVYNDDYDKIVTLYYLTSSGTTGSTLALILPVWSNNWELWTLSAIAAGAVEITGASYVDSDTSVTYTTSLDLPLTTTSASVPTGTAANWRGRSIYQVVTDRFARTDGSITYSCDVTDRVYCGGSYRGIINMLDYIQGMGFTAIWISPIVENIPDDTGYGYAYHGYWMKDIFALNTNFGGADDLIALATELHNRGMYLMVDIVVNHFAFSGNHADVDYSEYFPYSSQDYFHSFCWITDYSNQTNVEECWLGDDSVPLVDVNTQLDTVKSEYQSWVKQLIANYSIDGLRIDTVKHVQMDFWAPFQEAAGIYTVGEVFDGDPSYTCPYQENLDGVLNYPVYYPVVSAFQRVGGSISSLVDMIDTLKSECIDTTLLGSFLENQDNPRFPSYTSDESLIKNAIAFTILSDGIPIIYYGQEQGLNGGNDPYNREALWPTGYSTTSTFYEYIASLNQIRNHAIYIDDTYLTYQNWVIYSDSTTIAMRKGFTGNQIITVLSNLGSSGSSYTLTLSNTGYTASSVVYEILTCTAVTVDLSGNLAVPMSGGLPRVFYPESQLVGSGICSM

SEQ ID NO: 81 - protein, 476 aa, Lipomyces kononenkoae
KTAAEWKELSIYQVITDRFATTNLTAPDCWIRAYCGGTWKGLERKLDYIQNMGFDAVWISPVIHNIEVNTTWGFAFHGYWGDDPYRLNEHFGTAADLKSLSDSLHARGMSLMVDVVINHLASYTLPQDVDYSLYPAPFNTSSAFHQPCPIDFSNQSSIEDCWLVTEPAPALVDLKNEDQVILDALINSVVDLVETYDIDGIRLDTARHVPKPSLAKFQEKVGVFVTGEALNQSVPYVAQYQGPLNSAINYPLWYALVDSFMGRTTFDYLESVVKSEQATFSDAHALTNFLDNQDQPRFASYLGDGNGDDVLRDENAATFLFFVSGIPVIYYGFEQRFDGGFDPVNREPMWTSGYNTSTPLYNYLARLNAIRKYAASITGTQVFYSDDTVFLGSGVSHMAMQRGPLVIVLTNVGQHIIDNTGYTVTGSQFSAGDSLTDLVSCTKVKVVGANGTFTSPSNGGKARIWIKSKYAGKFCS

SEQ ID NO: 82 - protein, 626 aa, Bacillus subtilis
ETANKSNELTAPSIKSGTILHAWNWSFNTLKHNMKDIHDAGYTAIQTSPINQVKEGNQGDKSMSNWYWLYQPTSYQIGNRYLGTEQEFKEMCAAAEEYGIKVIVDAVINHTTSDYAAISNEVKSIPNWTHGNTQIKNWSDRWDVTQNSLLGLYDWNTQNTQVQSYLKRFLDRALNDGADGFRFDAAKHIELPDDGSYGSQFWPNITNTSAEFQYGEILQDSASRDAAYANYMDVTASNYGHSIRSALKNRNLGVSNISHYASDVSADKLVTWVESHDTYANDDEESTWMSDDDIRLGWAVIASRSGSTPLFFSRPEGGGNGVRFPGKSQIGDRGSALFEDQAITAVNRFHNVMAGQPEELSNPNGNNQIFMNQRGSHGVVLANAGSSSVSINTATKLPDGRYDNKAGAGSFQVNDGKLTGTINARSVAVLYPDDIAKAPHVFLENYKTGVTHSFNDQLTITLRADANTTKAVYQINNGPETAFKDGDQFTIGKGDPFGKTYTIMLKGTNSDGVTRTEKYSFVKRDPASAKTIGYQNPNHWSQVNAYIYKHDGSRVIELTGSWPGKPMTKNADGIYTLTLPADTDTTNAKVIFNNGSAQVPGQNQPGFDYVLNGLYNDSGLSGSLPH

SEQ ID NO: 83 - protein, 483 aa, Bacillus subtilis
VNGTLMQYFEWYTPNDGQHWKRLQNDAEHLSDIGITAVWIPPAYKGLSQSDNGYGPYDLYDLGEFQQKGTVRTKYGTKSELQDAIGSLHSRNVQVYGDVVLNHKAGADATEDVTAVEVNPANRNQETSEEYQIKAWTDFRFPGRGNTYSDFKWHWYHFDGADWDESRKISRIFKFRGEGKAWDWEVSSENGNYDYLMYADVDYDNPDVVAETKKWGNWYANELSLDGFRIDAAKHIKFSFLRDWVQAVRQATGKEMFTVAEYWQNNAGKLENYLNKTSFNQSVFDVPLHFNLQAASSQGGGYDMRRLLDGTVVSRHPEKAVTFVENHDTQPGQSLESTVQTWFKPLAYAFILTRESGYPQVFYGDMYGTKGTSPKEIPSLKDNIEPILKARKEYAYGPQHDYIDHPDVIGWTREGDSSAAKSGLAALITDGPGGSKRMYAGLKNAGETWYDITGNRSDTVKIGSDGWGEFHVNDGSVSIYVQK

SEQ ID NO: 84 - protein, 589 aa, Bacillus subtilis
MMEYAAIHHQPFSTDAYSYDGRTVHIKIRTKKGDADHIRFIWGDPYEYNDGKWSANEQPMRKIAATEMHDYWFAEVVPPFRRLQYAFVVTDDHEDIFFGSSGVCPYNEKTLETIHYYFKFPFVHEADTFQAPEWVKSTVWYQIFPERFANGREDLSPKNALPWGSKDPGVNDFFGGDLQGIVDKLDYLEDLGVNGIYLTPIFSAPSNHKYDTLDYFSIDPHFGDPEIFRTLVSQLHQRGMRIMLDAVFNHIGSASPQWQDVVKNGDQSRYKDWFHIHSFPVTDDNYDRFAFTADMPKLNTANPEVQKYLLDIALYWIREFDIDGWRLDVANEVDHVFWKTFRQAVSTEKPDVYILGEIWHSAEPWLRGDEFHAAMNYPFTEPMIEYFADQTISASRMAHRVNAHLMNGMKQANEVMFNLLDSHDTKRLLTRCRNDEKKARALLAFMFAQTGSPCIYYGTEIGLDGENDPLCRKCMVWEKEKQNQDMLQFMKRLIALRKQENTLLTEGHLEWNLLDDKNDFISFSRTLDEKILIYFFNQGNVVQHISLRELNIDRNNKICDAWTEQPLHYHDVIAVQPGEFLILSAAAPV

SEQ ID NO: 85 - protein, 483 aa, Bacillus lichenformis
ANLNGTLMQYFEWYMPNDGQHWKRLQNDSAYLAEHGITAVWIPPAYKGTSQADVGYGAYDLYDLGEFHQKGTVRTKYGTKGELQSAIKSLHSRDINVYGDVVINHKGGADATEDVTAVEVDPADRNRVISGEHLIKAWTHFHFPGRGSTYSDFKWHWYHFDGTDWDESRKLNRIYKFQGKAWDWEVSNENGNYDYLMYADIDYDHPDVAAEIKRWGTWYANELQLDGFRLDAVKHIKFSFLRDWVNHVREKTGKEMFTVAEYWQNDLGALENYLNKTNFNHSVFDVPLHYQFHAASTQGGGYDMRKLLNGTVVSKHPLKSVTFVDNHDTQPGQSLESTVQTWFKPLAYAFILTRESGYPQVFYGDMYGTKGDSQREIPALKHKIEPILKARKQYAYGAQHDYFDHHDIVGWTREGDSSVANSGLAALITDGPGGAKRMYVGRQNAGETWHDITGNRSEPVVINSEGWGEFHVNGGSVSIYVQR

SEQ ID NO: 86 - protein, 478 aa, Aspergillus niger
ATPADWRSQSIYFLLTDRFARTDGSTTATCNTADQKYCGGTWQGIIDKLDYIQGMGFTAIWITPVTAQLPQTTAYGDAYHGYWQQDIYSLNENYGTADDLKALSSALHERGMYLMVDVVANHMGYDGAGSSVDYSVFKPFSSQDYFHPFCFIQNYEDQTQVEDCWLGDNTVSLPDLDTTKDVVKNEWYDWVGSLVSNYSIDGLRIDTVKHVQKDFWPGYNKAAGVYCIGEVLDGDPAYTCPYQNVMDGVLNYPIYYPLLNAFKSTSGSMDDLYNMINTVKSDCPDSTLLGTFVENHDNPRFASYTNDIALAKNVAAFIILNDGIPIIYAGQEQHYAGGNDPANREATWLSGYPTDSELYKLIASRNAIRNYAISKDTGFVTYKNWPIYKDDTTIPMRKGTDGSQIVTILSNKGASGDSYTLSLSGAGYTAGQQLTEVIGCTTVTVGSDGNVPVPMAGGLPRVLYPTEKLAGSKICSSS

SEQ ID NO: 87 - protein, 477 aa, Aspergillus niger
ATPADWRSQSIYFLLTDRFARTDGSTTATCNTADQKYCGGTWQGIIDKLDYIQGMGFTAIWITPVTAQLPQTTAYGDAYHGYWQQDIYSLNENYGTADDLKALSSALHERGMYLMVDVVANHMGYDGAGSSVDYSVFKPFSSQDYFHPFCFIQNYEDQTQVEDCWLGDNTVSLPDLDTTKDVVKNEWYDWVGSLVSNYSIDGLRIDTVKHVQKDFWPGYNKAAGVYCIGEVLDGDPAYTCPYQNVMDGVLNYPIYYPLLNAFKSTSGSMDDLYNMINTVKSDCPDSTLLGTFVENHDNPRFASYTNDIALAKNVAAFIILNDGIPIIYAGQEQHYAGGNDPANREATWLSGYPTDSELYKLIASRNAIRNYAISKDTGFVTYKNWPIYKDDTTIPMRKGTDGSQIVTILSNKGASGDSYTLSLSGAGYTAGQQLTEVIGCTTVTVGSDGNVPVPMAGGLPRVLYPTEKLAGSKICYG

SEQ ID NO: 88 - protein, 431 aa, Streptomyces avermitilis
SPPGTKDVTAVLFEWKFDSVARECTNTLGPAGYGYVQVSPPAEHIQGSQWWTSYQPVSYKIAGRLGDATAFQNMINTCHTAGVKVVVDTVVNHMSAGSGTGTGGSAYTKYNYPGLYSSYDMDDCTATITDYTNRANVQNCELVGLADLDTGEEYVRKTIAGYMNTLLGYGADGFRVDAVKHIPAADLANIKSRLTNPSVYWKQEVIYASGEAVQPTEYTGNGDVQEFRYAYDLKRVFNNENLAYLKNYGEGWGYLNSSVAGVFVDNHDTERNGSTLNYKDGANYTLANVFMLAYPYGAPDINSGYEWSDADAGPPGGGTVNACWQDGWKCQHAWPEIKAMVAFRNATRGESVTNWWDNGGDAIAFGRGAKGYVAINHESGSLTRTYQTSLTAGTYCNVQNNTGVTVDSSGRFTATLGANTALALYSGKSTC

SEQ ID NO: 89 - protein, 643 aa, Clostridium phytofermentans
MYTLKSKLRDLYRHPVGYDVINKILLQAGLSKGLIENPVIGALPLSFLNRIAGKKLGNGFFDALLALLNQSNDRLDPYSSKDKKITPTWWKEAVFYQIYPRSFMDGNGDGVGDLPGIISKLDYLKELGVDALWLSPIYDSPGDDNGYDIRDYQKIDSQFGTMEDFDLLLTELHARNMRLVMDLVVNHTSDEHHWFKEALKSSESTYRDYYFLRKEPNNWTSFFSGSAWNHYPEEDLWGLHLFSKKQMDLNWENPKLRQDIYQMIRWWLEKGVDGFRLDVINYISKETGLPDGDSFIGNLMGFTGIEHYFYGPKLHNHLQEIQKEAFTPYQAFSVGETPGIGMKMGKLLTDDSRGELNMMFSFDHLETSGHARFDQYEYDLNYYKSYIMDWMENFADTSWMSLFYDNHDNPRMLSKVDHTHTHRQELAKMLAMIQMTLKGTPFLYQGQELGMINKDFHEISNFRDVESINKYKELCEKMPKEEAFLQILAGSRDHARTPMQWSAKPGCGFSNAVPWIDSDGDELVCNAEIQMQDSESVLSFYRDLIALRRKTPALIYGDIEFTHKKRKDILIYTRYLEGETYLIICNLSNDEQKLPGNVPVSESLEGLESLSASADERKGLVLCNYPAKVMKSLRAYEGRVYRI

SEQ ID NO: 90 - protein, 1016 aa, Clostridium phytofermentans
ATDTITIHYHRDDGDYEKWNLWLWAEGKDGAAYYFDGEDAFGPYVSVSLDKSADRIGFIVRTDSWEKDVSEDRFIDTSLGDEIWISSGESTFSYEAPEGYEKEVSIESFQLKLNYLRYDEEYTDISFRLTFEDGTTDFLTKEHMRIENGILKAEKEVKYGKKITLDVLKNGLEEDYQGVSFSTAKIDEESKLEMYWMQGTGTISPKADFIKRSKEIESALITSMKEITVKLSVPCRVDDIKQDGFKLSPKLAVSKVEATSTRDSEYKTIKEGYADTFIITMEEPLDMSKKYALSKTDYGSRNLTLDSGLYTSEEFEAAYTYEGNDLGATYSKEKTVFKVWSPSAESISVLFYPHGEAKDGEKPEITYPMKQTGAGVWQAEIEGDLKNKYYVYQVTVDGKTKLVVDPYAKAAGVNGERGMVIDLSETDPDGFREHSSPEFKNPVDAVIYEIHVRDLSMNENSGIENKGKFLGFTETGTTNSAGLSTGLDHMKELGVTHVHLLPSFDYKTIDESKLGENKFNWGYDPQNYNLPEGSYTTDPYQGEVRVREYKEMVQALHENGLHVVMDVVYNHTYTAGDSNFTSLVPGYYYRTDINGNFTNGSGCGNETASERAMVRKFIVDSVVYWATEYKVDGFRFDLMGLHDIETMNMVREALDKIDPSILLYGEGWTGGSTPLPDSKQAIKNNAVELNERIACFSDDIRDAIKGSVFDASDTGFINSGKRNVSNRDESIKFGIVASVSHPQVNLSGVPYSSRFWANEPSQTINYASAHDNLTLWDKLLETNKMASKEELVQMNKLSAAIVLTSQGIPFFQAGEEMARTKKGNDNSYQSPDSINMLNWDNKTEYKDLFEYYKGLIALRKTYDAFRMQTAEEIQQKLEFVDSDSSVIAYRIHDAVKDGREIALIFNGTLEEKEVVLSANAWDVLVNQDTAGTDVIETITGGTIKVPAKSTLVLLENKDAVIKGDKDAVKGDEIQELPTNMQEVAEKESGNAWLWVGIATVCVLAGGVLFWILKRKR

SEQ ID NO: 91 - protein, 554 aa, Clostridium phytofermentans
MKNTNTLHPWWESAAAYQIYPRSFMDSNGDGVGDLQGIISRLPYLSELGFDLIWICPIYPSPNDDNGYDISDYQNIQKEYGTMEDFEELLHKAHERGIRVIMDLVVNHTSSSHPWFIESRSSKDNPKRDWYIWKDGKDNVEPNNWESIFGGSTWEYDEKSGQYFLHVFGKTMPDINWENTQVKKAIFDMICWWLDKGIDGFRVDAISHIKKPDFNDMPNPKNERYVSSFDKHMNQSGILDLLNELKENAFSKYDIFTVAEANGVRIEEIEEWVSSEKGIFNSLFQFDHLNLWNVGSEEGKISIKKLKNALTKWQKAAPMDGNVALVMENHDLVRSISRFGSEDKYWKESAKCLALMYYMQKGVPFIYQGQEIGMLNADYESHLDFRDDPTLFAYQDRINNGMSPAESLQVLKKSSRDNSRTPMQWDASPHAGFTTGTPWMKVNQNYHWLNAEVQKEDEDSILNFYKKLIKIKKETTGLIYGDYKLLMEESESIYAYTREYEEKNYLVVCNLSEELSELQIDLDITKGEILISNYEDRNSKEMLLKPYECRLYSL

SEQ ID NO: 92 - protein, 538 aa, Clostridium phytofermentans
MVKKWWHSSVVYQIYPRSFNDSNGDGIGDLKGIIEKLDYLKNLGIDVIWLSPVFKSPNDDNGYDISDYEDIMDEFGTLEDMELLLKEANNRGIKILMDLVANHTSDEHKWFIESRKSKDNAYRDYYIWRDPVDGHEPNDLGSTFSGSAWEWDEATGQYYLHLFSKKQPDLNWENPIVREEVWKSMNFWIDKGIGGFRMDVIELLGKIPDEKIISNGPMLHEYIREMNRNSFGDKDLLTVGECWGATPEIAKMYSNPDGSELSMVFQFEHIGLDQIPGKDKWDLQPLNLIDLKNVFHKWQTCFHDDGWNSLFWNNHDTPRIVSRWGNDKVYKIESAKMLATLLHGLKGTPYIYQGEELGMANIKFKDINQYKDIETLNMYKDRLNKGYKHEDIMESIYAKGRDNARTPMQWSDEIDGGFTTGTPWIEVNPNFTEINAKEQVSNPNSIYNYYKKLIEIRKNNEVIVYGDFEMLLPEDKNIFAYVRTLKDSKIVVVCNFYENEVEYNIPKEYEEKKEVLISNYGLSLTGRLRPFEAIMYRV

SEQ ID NO: 93 - protein, 555 aa, Clostridium phytofermentans
CKKADVNQNPSELNQDESQKEKEENDDEGTPEVSQDETKAVIPYDYVQNLNIIDDNYRNFYEIFVYSFYDSNGDGIGDINGVISKLDYINDGNDATDSDLGFNGIWLMPIMPSTTYHKYDVTDYYNIDPQYGTLEDFKNLVSECHKRGIHLIIDFVFNHTSAKHPWFLEAVSYLESLKEGEEPDLEKCPYVGYYHFTKDYNGSKTYYKAGTSNWYYEGVFWDQMPDLALENENVRKEIEDIAKYWLDLGVDGFRLDAAKEYFSGEKERNIEVLKWFSDYVKSVKEDADIVAEVWDEEGTIAAYYESGIPSLFNFPLSQHNGLITNTARKLGTSSGKNFAKTLLRLDEKYKEGNPKYIDAPFISNHDTTRISAQCVNDEDQMKMSAGMLLTMNGSPYVYYGEEIGMNSKGTKDENKRLPMQWSATDTTGITTPPANADSVEQKFPPVDEQMKDPLSLYNYYKRAVRIRNENPEIARGDMSVIEELCTKDISAIKKVYQGSEIVILYNINTESANILLKDAGLTELNIRGYLSVDGNAVTMSDGVVSMPKYSIVILK

SEQ ID NO: 94 - protein, 583 aa, Clostridium phytofermentans
MKFEAIYHRTSDNYCYPLNEEDLIINIKTGHDIERVFIYYGDPFEGGILGGNWTWNGVEEELIYKKNLTHHIWWTTTVKPKFKRCKYYFKLVANDTSYYYFEDGFYTEAEMNHQDKNLVYFTFPWMNSIDINKTPDWVNDTVWYQIFPERFNNGDKENDPKNVKAWGFHTVSNDEFYGGDLQGIINRLDYLADIGISGIYLTPIFEANTSHKYDTKDYMKIDPHFGDEKVFKNLVDTAHEKGIRIMLDGVFNHCGNQFAPWLDVLKNGPDSKYFNWFMINKWPFNKEDHNTNDGSFYSFAFTSRMPKLNTNNPEVIKYLLDVVEYWVKNFDIDGIRLDVANEISHRFCKDLRKLTKELKPDFYILGELWHDAITWLHGDEFDGVMNYPLATSLADYWVYPEKTNYDFECAINHNFTMYMQQTNDVLFNLLDSHDTNRLIDKVKDIDIFYQQLAVLFTMPGSPCIYYGTEIAMEGSYDPDCRRCMPWEDIDAGLFKDRIEIIKALIHLRKTNNAFKSRHYHFIEDKNNNRVIHYIKTDEDHKQVEVILNCSKDSIVVQRKGNELFSLLNEDTILKPKGVFIQQI

SEQ ID NO: 95 - protein, 575 aa, Clostridium thermocellum
MKLEAIYHKPYSEFAFPVAPDTLVIRLRTAKNDVNTCILIYHEKYDTSQRGKVKMDKVASDGMFDYYEVELNVGIKRIKYMFYLEDNYSIKWYSSDGFFDYMPQWGHFTYSYICKDDIFHEVEWFRNSTIYQIFPDRFAKFPPDTENSGKRTIHGGNIKGIIDRFDHLVKLGVDVVYLNPIFKSESYHRYDVVDYYEIDPMFGSKEELRELMDLCHKNGIKVIFDGVFNHSGDKFFAFRDVVEKGEKSKYANWYFINSFPVQGYPRPNYECFSFYGGMPKLNTGNPETAKYFLDVVKYWTVEFGVDGWRLDAADEVDRKFWRKLRDMLKDLNKDVVLIGEIFDEASSWLWGDQFDSVINYPLKAMINDLFAYRSIDVETFRNRISGYIMKFNKKVLSSLVNIISTHDTPRFLTLCNGDEKRFEMAVVFQFTFPGVPLIYYGDEIGMEGEGDPDCRRPMIWDEAKWNKKTLELYKFLIGLRKRFDALRTGEYGELPVTGCNGILAYRRGRGENGIIVAMNTLDRKENVVVETGDSFDTVKAFESLKDEERLNVDKKRINICLNPFEWRIYKACGEL

SEQ ID NO: 96 - protein, 655 aa, Thermobifida fusca
MIGRFPILDVSPVVDIGTAKAVVGETFPVRATVFREGHEALGAGVVLYTPEGQRQPLVPLREIAPGTDRYEAEVTVTSEGLWHFAIEAWSDPYATWCHDARIKIPAGQDVELMLEEGARLLERAARRVPRRPALAEIAAAMRDGSRSAHERLDLALSDLVRDELAERPLRELVTRSQRFPVMVSRRRALFGSWYEFFPRSEGAVLDTEDGEPRSGTFATAARRLPAIADMGFDVVYIPPIHPVGYSFRKGRNNSTVAQPGDPGSVWAIGSHEGGHDAIHPDLGTIDDFDAFVARARELGLEIAMDLALQASPDHPWVKEHPEWFTVRADGSIAYAENPPKKYQDIYPINFDKDPEGIFTEVRRIVRYWMSHGVRIFRVDNPHTKPVAFWERLLADIAATDPDVIFLSEAFTRPAMMHTLAKIGFHQSYTYFTWRNTKQELEEYLTELTGEAAAYMRPNFFVNTPDILHAYLQHGGRPAFEVRAILAATLSPTWGMYSGYELCENRALKPGSEEYLDSEKYQYKPRDWEAAEAAGITITPLIRKLNSLRRSHPALQELRNLRFHYADQPEIICYSKRLAGANHGADDTILVVANLDPHHTREATVWLDMPALGFAPGDHITVTDQLSGHSYHWVEANYVRLDPHVQTAHIFTVAPA

SEQ ID NO: 97 - protein, 572 aa, Thermobifida fusca
APSGNRDVIVHLFQWRWKSIADECRTTLGPHGFGAVQVSPPQEHVVLPAEDYPWWQDYQPVSYKLDQTRRGSRADFIDMVNTCREAGVKIYVDAVINHMTGTGSAGAGPGSAGSSYSKYDYPGIYQSQDFNDCRRDITNWNDKWEVQHCELVGLADLKTSSPYVQDRIAAYLNELIDLGVAGFRIDAAKHIPEGDLQAILSRLKNVHPAWGGGKPYIFQEVIADSTISTGSYTHLGSVTEFQYHRDISHAFANGNIAHLTGLGSGLTPSDKAVVFVVNHDTQRYEPILTHTDGARYDLAQKFMLAHPYGTPKVMSSYTWSGDDKAGPPMHSDGTTRPTDCSADRWLCEHRAVAGMVGFHNAVAGQGIGSAVTDGNGRLAFARGSAGYAAFNATNTAWTRTFTTSLPDGVYCDVANGTFVDGVCDGPSYQVSGGKFTATVPANGAVALHVEAPGSCGPDGCGTPPGGGDDCTTVTARFHATVTTWYGQEVAVVGSIPELGSWQPAQGVRLRTDSGTYPVWSGAVDLPAGVGFEYKYVKLNPDGTVEWEQGGNRIATVDDSGGGCSQNFYDSWR

SEQ ID NO: 98 - protein, 825 aa, Anaerocellum thermophilum
MLVRAYIDDFNEIVVVLSQMVHSVKKEDFKVFLNEEEIDIEKIDKIIPHSDNPAEAETRGYEICEQKGKIRFVLKEGHFDYHRKPYKKPVFVIGEMNDWQISPEWEMTYSKLRGRYELIKDLKEIKIGQKFKFAEGASQKLWYPPGFGNDIVITEYFDRETAFTNMIRIIPSNRLLPNLKYKVVYKSEHIWARPREILTRPEFFYPGELGIKYEPYGTYFKLWAPTAYKVKVKVFDESENFRFEKEMARSENGTWNIYLTGDLKNHYYLYEVWHYNYDEDEGFIVYEVPDPYSKASSSNSQKSFIFDPADTLIEGWQQDEFVKTIEKQQDAIIYEMHVRDFTIDKNSGVDEKFRGKFLGLCQKSFYKEKFSTGLLHLKELGITHIHLLPISDFGSVDDKNPDKKYNWGYDPVLYQCPEYWYSTKSGGIEALKELKTMIKTLHQNGIGVVMDVVFNHTYHTKGGKFSIFDKIVPGYFYRIDDYGDYSNATGCGNEIATEKPMVRKFILDTIIYWTEDFHIDGFRFDLMGLIDTLTMRMIAKEVRKRNPYALIYGEGWVMGDSMCLLEERATIESTAHHGYSIGLFNDRIRDSIRGDLDGFKTGYMHGNLSDIERLKQGIRAAIDDFAKEPDECVNYVSCHDNLTLFDKAQKTMVGEDIFWIDRVCRLANAIILTSQGIPFLHGGVEFNRSKGGHPNTYNAGDNINKIDWSLKEKFYDTFKFYCDLIKLRKEHVAFRMRSSGEIRKYLKFLPAPDGIVAFLISYPYDAWKKIIVAYNPFKEKKVITLPEGVWKIKANDGIIFSEENELEAIGSFEISPVSLFIAYQK

SEQ ID NO: 99 - protein, 1104 aa, Anaerocellum thermophilum
DEKTTLIIHYYRYNEDYQGWNLWIWPVEPVGAEGKAYEFTSKDDFGVKAVVELPGKVTKVGIIVRKGNWEAKDVAVDRFISGISGSKEVWLIEGEEQIYTSQPQKTPKMTAFIDGLNTIVVKLAKKADILSNNRTQGFKVTAFYEEVPIKKVEPVLPKINKNFKPEEAGYELIDGGTKVKFILKPGAGDFKFTDTSGKLDVYVSGTMNDWGGTASSEGKYKPLPAWKMTWNAEKGYYELVKELGKDGVVIGAKFKFTSWDGTSAKWYPDGMGNDKVIEELYTGNEKITKVDTFKITTEDELEPQVPYVVSKDSFKPTVAQARNILDNPKYYYKGNDLGCTYTKAYSAFRLWAPTAIGVILRLYDDYKTTKYKEYEMQQSFNGTWYLKINGDLKGKYYQYEVWHASNSITDDTIRKYVVPDPYSRATSANSERTLIFDPKDTNPVGWEKDTFVTLKNQEDAIIYETHVRDFTIDASSGVRPEFRGKYLGFTQTGAKGPNGVKTGIDHLKELGITHVHLLPTYDFGSIDETNPDKGYNWGYDPVLYQNVEGSYATNPNTIVRIKEYKQMVMALHKAGIGIIQDVVFNHTFQIGDAKFSIFDKIVPGYFYRKDKDGNYSNASGCGNEIATEKPMVRKFIIDTLTYLTKEYHIDGFRFDLMAAIDRVTMAKAQEEVRKINPSAVIYGEGWLAGSTPLDSSLRMEIGSFNQAGLHIGLFNDRIREAIRGNLDNESKGFMQGNYSFRLEDLKRGIQGGLGDFAADPDECINYVSAHDNLTLWDKLQKSVPNEPDYIKDKMGRLANAIVLTAQGVPFLHGGVEFNRTKYMNHNSYNAGDKINKYNWNLKVKWYNTFKYYQGLIALRKAHPAFRMTTAEDIQKYLTFIQTPKGTLGFRLTYPKDTWNDIIVVYNSTKKVQEVTLPEGNWVVVANGDEVGTTPIKNLTNFVAGKALVAPISMFVAYKSNEFPQGFTKVTGKDPVSLESSSTVTVPKVYGNGNIEVTFKVKVPHGTDDDVIYLAGSFGKAGLSDWNPGDKDGAIELVRLQDGTYTVTVKLNAGETFEYKYTRGSWTTVEKGANKEEIENRKLTVKDEGGGKMIVSDTVLNWADK

SEQ ID NO: 100 - protein, 611 aa, Anaerocellum thermophilum
MRKPHIIEAIIGNTKVLGQLDSNGILQRFYWPAVDYYQQLKLFLAAVFLDGLVFFEDENFKIKSGFVDDFVYFFEYKIADKTIFQLDFVDFETDSLVRLWETGFEDFYVFLEPMINSSSLFNAAKVDKENEIVYAYFKGTYIGLAFENKIKSFTVKNGIDDANDNQLEGWNEATNPQIAVKLKNTGKVVCFLAFGNSKDEIYQKLSYLKQKGYDEVYRQNKAFWEKKFSKVKLICTQDPKDMQLQKRSAYVFYVLQNSKTGGILAASEVDEKFFHCGGYGFVWGRDAAFIVSAMDELGLSREVEKFFGFKFSCQEKEGFWDQRYYTDGSLAPSWGIQIDETASVVWGFLEHCEKQNSLHLIDLHKEQLKKALLFLIAAVDSEKGVIFRSFDLWEEREGIHLYSNASIYAALKKAKKYFPELESEIEKKLKAIKNQMATRFYSPKLSRYVRSTDVRIPHEEFLKLPEENRYMQKDERYEITYYFKKQDEVVDISMLGIYYPFEMVDSSDKAFKATILAIERECQNSIVGGYKRYSDDRYIGGNPWILTTLWLAIYYKKTGQIDRAEKLFEWAKAHSLPNGLFPEQVDRITGKPAWVVPLAWSHAMYVLYLYE

SEQ ID NO: 101 - protein, 529 aa, Streptomyces avermitilis
MTSFRPAPAWLADAVFYQIYPQSFADSDGDGIGDFNGIVQRLDHLVWLGVTAVWLNPCFVSPFRDAGYDVSDYLNVAPRYGSADDLAELVDEAGRRGIRVLLDLVAGHTSDEHPWFTASANDPDDHRYIWAPEGRPDGFVTSPGTRPGAYLPNFFDTQPALNFGYGRKNPAEPWRQPVDAAGPRANREALRTIMDHWLGLGLAGFRVDMAASLVKDDPGRTETARIWTELRHWLDTAHPDAVLLSEWGEPEVSVPAGFHTDFFLQFGGATDGLPLRSLWSNGDGTVNEAWDPLDCFFDASGKGSPRPFVEAWRKASDAVGATGFVSLPTANHDFSRLNCGPRTAEQLPAAFAFQLTWPTLPAIYYGDEIGMRYVGGLPDKEGSVLGPRYNRAGSRTPMQWDDGPGAGFSTAPADRLYLPLDPSPDRPTVAAQRADDGSLLHLVRRLVALRASTPALGSGGSVEVLHTGYPFVYVRGGRYLVVVNPQRNEVRCPYDATREARALEASGVRVGNGTIEAEGFSYGVFDLGR

SEQ ID NO: 102 - protein, 431 aa, Streptomyces avermitilis; identical to SEQ ID NO: 88

SEQ ID NO: 103 - protein, 503 aa, Saccharomycopsis fibuligera
LPLQEGPLNKRAYPSFEAYSNYKVDRTDLETFLDKQKDVSLYYLLQNIAYPEGQFNDGVPGTVIASPSTSNPDYYYQWTRDSAITFLTVLSELEDNNFNTTLAKAVEYYINTSYNLQRTSNPSGSFDDENHKGLGEPKFNTDGSAYTGAWGRPQNDGPALRAYAISRYLNDVNSLNKGKLVLTDSGDINFSSTEDIYKNIIKPDLEYVIGYWDSTGFDLWEENQGRHFFTSLVQQKALAYAVDIAKSFDDGDFANTLSSTASTLESYLSGSDGGFVNTDVNHIVENPDLLQQNSRQGLDSATYIGPLLTHDIGESSSTPFDVDNEYVLQSYYLLLEDNKDRYSVNSAYSAGAAIGRYPEDVYNGDGSSEGNPWFLATAYAAQVPYKLVYDAKSASNDITINKINYDFFNKYIVDLSTINSGYQSSDSVTIKSGSDEFNTVADNLVTFGDSFLQVILDHINDDGSLNEQLNRNTGYSTSAYSLTWSSGALLEAIRLRNKVKALA

SEQ ID NO: 104 - protein, 497 aa, Saccharomycopsis fibuligera
VPVELDKRNTGHFQAYSGYTVARSNFTQWIHEQPAVSWYYLLQNIDYPEGQFKSAKPGVVVASPSTSEPDYFYQWTRDTAITFLSLIAEVEDHSFSNTTLAKVVEYYISNTYTLQRVSNPSGNFDSPNHDGLGEPKFNVDDTAYTASWGRPQNDGPALRAYAISRYLNAVAKHNNGKLLLAGQNGIPYSSASDIYWKIIKPDLQHVSTHWSTSGFDLWEENQGTHFFTALVQLKALSYGIPLSKTYNDPGFTSWLEKQKDALNSYINSSGFVNSGKKHIVESPQLSSRGGLDSATYIAALITHDIGDDDTYTPFNVDNSYVLNSLYYLLVDNKNRYKINGNYKAGAAVGRYPEDVYNGVGTSEGNPWQLATAYAGQTFYTLAYNSLKNKKNLVIEKLNYDLYNSFIADLSKIDSSYASKDSLTLTYGSDNYKNVIKSLLQFGDSFLKVLLDHIDDNGQLTEEINRYTGFQAGAVSLTWSSGSLLSANRARNKLIELL

SEQ ID NO: 105 - protein, 747 aa, Saccharomyces cerevisiae
FPTALVPRGSSSSNITSSGPSSTPFSSATESFSTGTTVTPSSSKYPGSKTETSVSSTTETTIVPTTTTTSVITPSTTTITTTVCSTGTNSAGETTSGCSPKTITTTVPCSTSPSETASESTTTSPTTPVTTVVSTTVVTTEYASTSTKQGGEITTTFVTKNIPTTYLTTIAPTSSVTTVTNFTPTTITTTVCSTGTNSAGETTSGCSPKTVTTTVPCSTGTGEYTTEATAPVTTAVTTTVVTTESSTGTNSAGKTTTSYTTKSVPTTYVFDFGKGILDQSCGGVFSNNGSSQVQLRDVVLMNGTVVYDSNGAWDSSPLEEWLQRQKKVSIERIFENIGPSAVYPSILPGVVIASPSQTHPDYFYQWIRDSALTINSIVSHSADPAIETLLQYLNVSFHLQRTNNTLGAGIGYTNDTVALGDPKWNVDNTAFTEPWGRPQNDGPALRSIAILKIIDYIKQSGTDLGAKYPFQSTADIFDDIVRWDLRFIIDHWNSSGFDLWEEVNGMHFFTLLVQLSAVDRSLSYFNASERSSPFVEELRQTRRDISKFLVDPANGFINGKYNYIVETPMIADTLRSGLDISTLLAANTVHDAPSASHLPFDIDDPAVLNTLHHLMLHMRSIYPINDSSKNATGIALGRYPEDVYDGYGVGEGNPWVLATCAASTTLYQLIYRHISEQHDLVVPMNNDCSNAFWSELVFSNLTTLGNDEGYLILEFNTPAFNQTIQKIFQLADSFLVKLKATWEQTGN

SEQ ID NO: 106 - protein, 621 aa, Aspergillus niger
NVISKRATWDSWLSNEATVARTAILNNIGADGAWVSGADSGIVVASPSTDNPDYFYTWTRDSGLVLKTLVDLFRNGDTSLLSTIENYISAQAIVQGISNPSGDLSSGAGLGEPKFNVDETAYTGSWGRPQRDGPALRATAMIGFGQWLLDNGYTSTATDIVWPLVRNDLSYVAQYWNQTGYDLWEVNGSSFFTIAVQHRALVEGSAFATAVGSSCSWCDSQAPEILCYLQSFWTGSFILANFDSSRSAKDANTLLLGSIHTFDPEAACDDSTFQPCSPRALANHKEVVDSFRSIYTLNDGLSDSEAVAVGRYPEDTYYNGNPWFLCTLAAAEQLYDALYQWDKQGSLEVTDVSLDFFKALYSDATGTYSSSSSTYSSIVDAVKTFADGFVSIVETHAASNGSMSEQYDKSDGEQLSARDLTWSYAALLTANNRRNVVPSASWGETSASSVPGTCAATSAIGTYSSVTVTSWPSIVATGGTTTTATPTGSGSVTSTSKTTATASKTSTSTSSTSCTTPTAVAVTFDLTATTTYGENIYLVGSISQLGDWETSDGIALSADKYTSSDPLWYVTVTLPAGESFEYKFIRIESDDSVEWESDPNREYTVPQACGTSTATVTDTWR

SEQ ID NO: 107 - protein, 593 aa, Aspergillus oryzae
VQPVLRQATGLDTWLSTEANFSRQAILNNIGADGQSAQGASPGVVIASPSKSDPDYFYTWTRDSGLVMKTLVDLFRGGDADLLPIIEEFISSQARIQGISNPSGALSSGGLGEPKFNVDETAFTGAWGRPQRDGPALRATAMISFGEWLVENSHTSIATDLVWPVVRNDLSYVAQYWSQSGFDLWEEVQGTSFFTVAVSHRALVEGSSFAKTVGSSCPYCDSQAPQVRCYLQSFWTGSYIQANFGGGRSGKDINTVLGSIHTFDPQATCDDATFQPCSARALANHKVVTDSFRSIYAINSGRAENQAVAVGRYPEDSYYNGNPWFLTTLAAAEQLYDALYQWDKIGSLAITDVSLPFFKALYSSAATGTYASSTTVYKDIVSAVKAYADGYVQIVQTYAASTGSMAEQYTKTDGSQTSARDLTWSYAALLTANNRRNAVVPAPWGETAATSIPSACSTTSASGTYSSVVITSWPTISGYPGAPDSPCQVPTTVSVTFAVKATTVYGESIKIVGSISQLGSWNPSSATALNADSYTTDNPLWTGTINLPAGQSFEYKFIRVQNGAVTWESDPNRKYTVPSTCGVKSAVQSDVWR

SEQ ID NO: 108 - protein, 579 aa, Rhizopus oryzae
ASIPSSASVQLDSYNYDGSTFSGKIYVKNIAYSKKVTVIYADGSDNWNNNGNTIAASYSAPISGSNYEYWTFSASINGIKEFYIKYEVSGKTYYDNNNSANYQVSTSKPTTTTATATTTTAPSTSTTTPPSRSEPATFPTGNSTISSWIKKQEGISRFAMLRNINPPGSATGFIAASLSTAGPDYYYAWTRDAALTSNVIVYEYNTTLSGNKTILNVLKDYVTFSVKTQSTSTVCNCLGEPKFNPDASGYTGAWGRPQNDGPAERATTFILFADSYLTQTKDASYVTGTLKPAIFKDLDYVVNVWSNGCFDLWEEVNGVHFYTLMVMRKGLLLGADFAKRNGDSTRASTYSSTASTIANKISSFWVSSNNWIQVSQSVTGGVSKKGLDVSTLLAANLGSVDDGFFTPGSEKILATAVAVEDSFASLYPINKNLPSYLGNSIGRYPEDTYNGNGNSQGNSWFLAVTGYAELYYRAIKEWIGNGGVTVSSISLPFFKKFDSSATSGKKYTVGTSDFNNLAQNIALAADRFLSTVQLHAHNNGSLAEEFDRTTGLSTGARDLTWSHASLITASYAKAGAPAA

SEQ ID NO: 109 - protein, 644 aa, Clostridium thermocellum
MANTYFNDAIIGNSGMLVCLTRNGELTRLFWPNIDYPQHFEKMATGIFYTGQKNSTSWFYEDNWHHTQYYVEDTNILKTICEDGGRGLRVEQTDFVLKDRDVMVRRYVIENIGPNEVDLGFVQYSSTVSTTPELRSTLFDFNVDALIHYRHNYYISISSDSEVVQFQLGNNAFDCARYTELYGYDSIGMMKDGAMSFNIGKIEPGGKKTFNLFICASHTLKGVKELVRWCRKMNVDEEYEKTRKYWLDFLKNARLIVTGDKNIDNLYKRSILVFKLMSDERTGGLLASAEIDEGFTRCGRYAYCWGRDAAFITGALDTAGLTEAVDKFYQWAVMTQDDDGSWQQRYHMDGNLAPSWGLQIDETGTLIWGMLKHYEVTKNIDFLKSMWESIKKGVEFLTRFIDSDTGLPAPSYDLWEERVGEHTYSSAAVYAGIKAGAEAARILGASEELIEKWEKAASDMKASIEKNFWRDEAGRFIRSVRTKLNPWGSEHSPYTTVIKVNEKGYFRDVTLEDWTIDVSLLGVSIPFGVFDVHDERVKKTVEAIERALTSHPVGGIKRYENDNYIGGNPWVLATLWVALYYIEIKEYEKAKDYLRWATKSCTALGLLPEQVSKDNGEPCWVIPLTWSHAMYVLVLAGLKEAGVL

SEQ ID NO: 110 - protein, 644 aa, Clostridium thermocellum
MQKSYYNNAITGNSSMLACFSERAELLRLFWPDIDYIQNLDKMFLGLFEKNKTGSTVWLNDIRCEHHQEYLPDSNIIKNMVTNFFDGYKVVLYDFVHPEMDVLVRRFEIENLRGESRELGLMSFSAATSSDSEVACSLFDFMNEALVHYKPDSYIAVTSDIPVYQFQIGNNANDAAVNTYLYGKDDIGMMKDAAISWDLGVFQPHAVKTTNVYLCAADTLKSCKALVRRVKTVGGLTAFRETGRYWKDYLEKTTKLKSGNTLLDDLYKRSLLVFRLMYSKKSGGLMAAPEVDEYFTKCGKYAYCWGRDAAFITGALDIGGLCESVDHFYKWAVNVQDEDGSWQQRYHMNGNLGPCWGLQVDETGTIIWGMLNHYNYTKNTDFLKSVWDSVKAAADFLVRFIDSETGLPRPSFDLWEERYGEHAYSSASVCAGLKSASEMARILGKPSQEYIQWETTADSIKKAIVKYFWKEDYRRFIRSIRVKLNGFGQEPSSDTMLIKVNPKGYVRDVTKEDWIVDVSLVGLGIPFEIFELNDPMLRDTVSLIEQVLTAQGVGGIKRYENDTYIGGNPWILTTLWIALYHAKSGNYKKAKEYLIWAASGKTELGLLPEQINRDTGKPEWIIPLTWSHAMYVHVYSELINAGVL

SEQ ID NO: 111 - protein, 608 aa, Arxula adeninivorans
DSCHTFTLANSPPDDKAVALSSYSYCGGYLSASAFVKNLSYDKLVTLYWTNADNKSTPLNAGSLDYVKAASDDQSWELWSLNVTTVPDGVDALLNITYVAASIGKTNSQQLNVQVEATGDPIPTPQIPTIYKPYASPSDFSDDITNWLKPSNDSQTGIAKSFLFNNINIPGAAPGTVIAAQSYSEPDYAYTWVRDASLVMDVVNRLYSSAKSEEKRQLYEKILFQYAKAGAQEQNDPTAISGMGEPKFYLNNTAFTGSWGRPQNDGPATRAITLIEFANAYLANGGSQDTVREQLYDSDKYPQVAPIKKDLQFVASNWSSPSFDLWEEEESAHFYTRLVQRKALLLGADFANDMGDHELSDKLKTQASKLSDTLPEFWDSARQLILYEYGPVLRGKYSYKDISVVLGVMHGYANDNVFSYTNDQILATAYQVSTSFLDVYKVANTTSDESGKPLGIPVGRYPEDVYDGVGTSQGNPWYLTTMAMAEFLYRSVQEFEDAGSIIISDTSLPFWKYFASSVDHKAGAKYNKNDQSFKTSLKSLTGWGDAFMRRAKYHTPSSGHMSEEFNRTTGEPRGAKDLTWSYASLLSAAFAREELRNQKNYLTNVADL

SEQ ID NO: 112 - protein, 595 aa, Hormoconis resinae
APTELKARDLSSFIASERAIALQGALNNIGPDGSAVPGAGAGFVVASPSKANPDYFYTWSRDSALTLKMIIDEFILGNTTLQTIIEQYIHAQAVLQTVSNPSGTFLPDGVGLGEPKFMVDGTRFNGPWGRPQRDGPALRAIALMTYSNWLIKNGQFAEAKTKIWPIIANDLSYVGQYWNQSGFDLWEETYASSFFTIQNQHRALVEGAQLAHDLGVTCTGCDQAPEVLCFLQSFWNGKYIVSNINVNNGRTGLDGNSILGAISTFDIDAYCDSPTLQPCHSQSLANFKVLTDTFRNLYTINAGIPEGQGVAVGRYAEDVYMGGNPWYLITTAAAEFLYDAVAQWKARHVLTVDETSLAFFKDIYPEVTVREYKSGNANSPFAQIMDAVTAYADSYVAIAEKYIPSNGSLSEQFNRDTGTPLSAIDLTWSYAAFITMSQRRAGQYPSSWGSRNALPPPTTCSASSTPGIYTPATAAGAPNVTSSCQVSITFNINATTYYGENLYVIGNSSDLGAWNIADAYPLSASAYTQDRPLWSAAIPLNAGEVISYQYVRQEDCDQPYIYETVNRTLTVPACGGAAVTTDDAWMGPVGSSGNC

SEQ ID NO: 113 - protein, 601 aa, Aureobasidium pullulans
LPSPESIQERATGSLSSWLSSENTVALQGVLNNIGASGSKASGASAGVVVASPSKSNPDYFYTWTRDSALVFKALVDQLIAGNKSLEPLIQQYISAQAKLQTVNNPSGGLCSGGLAEPKFEVDLTPFTGAWGRPQRDGPALRATAMIAYSRYLIANGNTTTVNNIIWPIVQNDLSYVTQYWNQTTFDLWEEINSSSFFTTAVQYRALVEGNNLATQLGKSCPNCVSQAPLVLCFLQSYWTGSYALSNTGGGRSGKDANSILTSIHIFDPAASCDSTTFQPCSDKALANHKVVTDSFRSIYSINQGIAQGSGVAVGRYPEDSYYNGNPWYLNTFAAAEQLYDAVYQWKKIGSISITSISLPFFKDVYSSAAVGTYSSSTVTFTSIVNAVQTYADSYMSIAQKYTPSNGALSEQYNRADGTPLSAVDLTWSYAAFLTAYNARANVLPASWGASSAKLPNSCSSGSATGPCAAATNTNWGNPGSPSTGTPTTTTGGSCTTPTSIAVTFNEQKTTSYGENIYIVGSIPALGNWNTANAVALSASKYTSSNPLWTVTINFATGTSFNYKYIKKAQDGSVTWESDPNRSYTVTGNCAGTATENDSWR

SEQ ID NO: 114 - protein, 718 aa, Bacillus subtilis
MVSIRRSFEAYVDDMNIITVLIPAEQKEIMTPPFRLETEITDFPLAVREEYSLEAKYKYVCVSDHPVTFGKIHCVRASSGHKTDLQIGAVIRTAAFDDEFYYDGELGAVYTADHTVFKVWAPAATSAAVKLSHPNKSGRTFQMTRLEKGVYAVTVTGDLHGYEYLFCICNNSEWMETVDQYAKAVTVNGEKGVVLRPDQMKWTAPLKPFSHPVDAVIYETHLRDFSIHENSGMINKGKYLALTETDTQTANGSSSGLAYVKELGVTHVELLPVNDFAGVDEEKPLDAYNWGYNPLHFFAPEGSYASNPHDPQTRKTELKQMINTLHQHGLRVILDVVFNHVYKRENSPFEKTVPGYFFRHDECGMPSNGTGVGNDIASERRMARKFIADCVVYWLEEYNVDGFRFDLLGILDIDTVLYMKEKATKAKPGILLFGEGWDLATPLPHEQKAALANAPRMPGIGFFNDMFRDAVKGNTFHLKATGFALGNGESAQAVMHGIAGSSGWKALAPIVPEPSQSINYVESHDNHTFWDKMSFALPQENDSRKRSRQRLAAAIILLAQGVPFIHSGQEFFRTKQGVENSYQSSDSINQLDWDRRETFKEDVHYIRRLISLRKAHPAFRLRSAADIQRHLECLTLKEHLIAYRLYDLDEVDEWKDIIVIHHASPDSVEWRLPNDIPYRLLCDPSGFQEDPTEIKKTVAVNGIGTVILYLASDLKSFA

SEQ ID NO: 115 - protein, 710 aa, Bacillus licheniformis
MPGISRPFEAYLDEMRTITVLVPKSRASSCSPPFLLEDDQGERIELSVKAQVELEEQFKYVLESSCTVPFGRVHKVCCEESVWTDLQIGSVTRSAAFDKAFFYDGRLGAFYSKGSTLFKVWAPTASAAAIKLEDPDSLQTNTFQMMRRKKGVFEVTVEGDLNGWSYLYELYVNGKPLLTVDPYAKAVTANGEKGVVLDPEEVKVEKHRAPRLHSPCDAVIYEVHIRDFSIHEDSGMRHKGKYVAFTEDGTETSGGFSTGIAYLKELGVTHIEVLPFHDFAGVDELSPDQSYNWGYNPLHFNAPEGSYSLDPQNPKCRITELKTMIQSLHKHGFSVIMDAVYNHVYKRETSPFEKTVPGYFFRHNEYGFPSDGTGVGNDIASERLMVRKYILDSVRYWLEEYDVDGIRFDLMGILDIETVRQISTLAENVKPGVPLFGEGWDLNTPLDSGQKATLQNAGKVPAVGFFNDRFRNAVKGSTFELSDRGYALGDTGKKAALQHGIAGSPGFLQPAQSINYVECHDNHTFWDKMALCFEEDADTKRLRQRLAVSIVLLSQGVPFLHAGQEFCRTKNGDSNSYRSGDDINKLDWEKRAELCEDVEYVRQLIRLRRSHPAFRLQKEEEVKEHLSFMDGTGEVTAYKLKNIAAIDPWNEIIVVHCPFAKKETLKLPDQKQYLLHCDPFTFFNGKVQAEKRLRLNGIGTYVLYEPKGIF

SEQ ID NO: 116 - protein, 918 aa, Oryza sativa
MAVGEECAAAVASQGFVSDARAYWVTRSLIAWNVNDQDTSLFLYASRDATMHVSDGAIHGYDSKIELEPEHASLPDNVAEKFPFIRSYRTFRVPSSVDVTSLVKCQLAVASYDAHGRHQDVTGLQLPGVLDDMFAYTGPLGAVFSDKDVDLYLWAPTAQDVRVCFYDGPAGPLLQTVQLKELNGVWSVTVPRYRENQYYLYEVKVYHPSTSQVEKCLADDPYARGLSANGTRTWLVDINSETLKPASWDELSDEKPNLESFSDISIYELHIRDFSAHDSTVDCNSRGGFRAFTFQDSAGIRHLRKLSAAGLTHVHLLPSFHFASVDDNKSNWKFVDEAQLAKLPPGSDEQQAAIVSIQQEDPYNWGYDPVLWGVPKGSYASNPDGPSRIIEYRQMVQALNRIGLRVVMDVVYNHLDSSGPFGVSSVLDKIVPGYYLRRNVNGQIENSAAMNNTASEHFMVDRLIVDDLLNWAINYKVDGFRFDLMGHIMKSTMFTVMSICTISTIIKIKDVFADTLIRAKSAIRSLTRDVHGVDGSKIYLYGEGWDFGEVAQNKRGINASQINMSGTGIGSFNDRIRDSVNGGNPFGNPLQQGFSTGLFLEPNGYYQGNEADTRRELATYADHIQIGLAGNLKDYVLRTHTGEAKKGSDIYTFDGSPVGYTSSPVETINYVSAHDNETLFDIVSIKTPIGLSIDEKCRINHLASSMIALSQGIPFFHAGDEILRSKSLDRDSYNSGDWFNKLDFTYETNNWGVGLPPRDKNEENWHLIKPRLENPSFRPLKNHILSVFDNFVDILKIRYSSPLFRLSTASDIEQRVRFHNTGPSMVPGVIVMSIKDAQNEKCKMAQLDKNFSYVVTIFNVCPHEVSIEIHDLASLGLELHPIQVNSSDALVRQSAYEASKGRFTVPRRTTAVFVQPRC

SEQ ID NO: 117 - protein, 963 aa, Triticum aestivum
MPMPMRTMLLRHLSPAPALPNPRRSSASSPQRRPARARPPPLHSARATALRARRTPMAAGETGASVSVSAAEAEAEATQAFMPDARAYWVTSDLIAWNVSEQEAASVYLYASRTAAMGLSPSNGGIQGYDSKVELQPESAGLPETVTQKFPFISSYRAFRVPSSVDVASLVKCQLVIASFGADGKHVDVTGLQLPGVLDDIFAYTGPLGAVFREDSVSLHLWAPTAQDVSVCFFDGPAGPVLETVQLKESNGVWSVTGPREWENRYYLYEVDVYHPTKAQVLKCLAGDPYARGLSANGARTWLVDINNETLKPASWDELADEKPKLDSFSDITIYELHIRDFSAHDGTVDSDSCGGFRAFAYQASAGMQHLRKLSDAGLTHVHLLPSFHFAGVDDIKSNWKFVDECKLATFPPGSDMQQEAVVAIQEEDPYNWGYNPVLWGVPKGSYASDPDGPSRIIEYRQMVQALNRIGLRVVMDVVYNHLDSSGPCGISSVLDKIVPGYYVRRDTNGQIENSAAMNNTASEHFMVDRLIVDDLLNWAVNYKIDGFRFDLMGHIMKHTMMRAKAALQSLTRDAHGVDGSKIYLYGEGWDFAEVARNQRGINGSQLNMSGTGIGSFNDRIRDAVNGGNPFGNPLQQGFNTGLFLEPNGFYQGNEADTRRSLATYADQIQIGLAGNLRDYVLITHTGETKKGSEIHTFDGLPVGYTSSPIEIINYVSAHDNETLFDVISVKTPMNLSVDERCRINHLASSMMALSQGIPFFHAGDEILRSKSIDRDSYNSGDWFNKLDFTYETNNWGVGLPPSEKNEDNWPLMKPRLENPSFKPAKGHILAALDSFVDILKIRYSSPLFRLSTASDIKQRVHFHNTGPSSVPGVIVMGIEDARDEKPEMAQLDANFSYVVTVFNVCPHEVSMDIPALASMRLELHPVQVNSSDALVGKSVYEAATGRFTVPRRTVSVFVEPRC

SEQ ID NO: 118 - protein, 647 aa, Clostridium phytofermentans
MDEFWNSIDGEKQYYYDGNDLGCTYTNRSTKLKVWAPTASMVVVNLYQNGNAGKPYITEIMKKEESGIWSVCLLGDLEGVYYTYLVTVDGQTKEAVDPYARTTGLNGKRAMILDLEKTNPTGFLEDTKPKFDSFLDAVIYELHIRDLSMESDSGIKEKGKLLGLTELNTRNSDGLTTGLSHILDLGVTHIHLLPCFDYASVDEENSSIFNWGYDPENYNVVEGSYSTNPYDGAVRVKEFKTLVQSLHENGLRVIMDVVYNHTMKTEESNFNKIVPDYYYRKVGDKFSDASACGNETASERLMVRKFIVDSIIYWAKEYHIDGFRFDLMGIHDIETMNEVRKVLDQIDPSIILYGEGWVGGDSPLPAGQRAMKANMSMLPGIAAFSDDFRDGLKGSVFLAEEKGFATGDSDKKESVKFGVVASTLHPQIDYKKVNYSDSPWALEPAQCINYVSAHDNYTLWDKIACSCKEDTYEIRVKKNKLCAAIVFTSQGIPFLQAGEEMLRNKPSSEIAGEFVENSYNSSDSVNCIKWSNKANVIDVVSYYEGLIRFRKEHKALRMQSAKEISKRLTFLPEEREDVISYLIQGDLVDKTLCVIYNSSEEKVTIRLPESDWTVYIDGNNSGVEPLYEVKGTTVEVEPISCMVLVKD

SEQ ID NO: 119 - protein, 1764 aa, Streptomyces avermitilis
ATPPAPPSDAKLAAEPARHDATREQFYFVMPDRFANGDTSNDKGGLTGSRLSTGYDPTDKGFYQGGDLKGLTRKLDYIKGLGTTSIWLAPIFKNQPVQGTGKDASAGYHGYWITDFTKVDPHFGTNKDLETLISKAHAKGMKVFFDVITNHTADVVDYEEKSYGYLSKGAFPYLTKDGRPFDDAGYTDGPRKFPAVDGDSFPRTPAVAARKKNAKVPSWLNDPTMYHNRGDSTFAGESSTHGDFSGLDDLWTERPEVVRGMEKIYEKWVRDFGIDGFRIDTVKHVNTEFWTQWATALDAYAKKRGKDDFFMFGEVYSADTSVTSPYVTQGRLDSTLDFPFQDAARSYASQGGSAKKLASVFGDDYKYTTDKANAYEQVTFLGNHDMGRIGYFLNQDNPKATDAELLRKDRLANELMFLSRGNPVVYYGDEQGFTGSGGDKDARQTMFASKVADYLDDDEIGTDRGHASDAYDTSAPLYKEIAALSKLRKDNPALADGIQTERYAADGAGVYAFSRTDARTGTEYVVAVNNADKASAATFATGSADTAFKGIHGTDDVLKSDADKKITVTVPAGAAVVLKAAGRPGTPAAKPSLTLKAPDAGATGTVELSADVDGGRLNRVVFAAQVGNAKWRTLGSADHAPYRVTQTIGKDVPAGTALRYKAVVIDAAGRTASATAASTTGTPPAAETPTASSRDYAIVHYKRPDGDYTDWRLYAWGDLADGESTTWPAGHDFVGRDAYGAFAYVKLKPGASTVNFLVIDKDGDKDVSADRTIDVTKAGEVWVEQGKETVRTERPDYPAQDKTKAVIHYHRADGDLTGWGLHVWTGAATPTDWSKPLEPVRTDAYGAVFEVPLTDGATSLSYIIHKGDEKDLSADRSLDLTADGHEVWLLNGQENHLLPQPAGSAAALDLTTSKAVWIDRNTVAWNGSDAAASTQLLSSRDGSIAVKDGSLTSDDERWLRLSKTSLTDAQKAAFPHLKSYTAWSVDPRDRDRVREALAGQVVASQRAANGAVLAATGVQLAGVLDDLYDATKADLGPTFRGGHPTLAVWAPTAQSVSLELDGAHVRMKRNNATGVWSVTGPASWKGKPYRYVVKVWAPTVRKVVTNKVTDPYSVALTTDSERSLVVDLDDRSLAPSGWSSLKKPKAVPLRDAEIQELHIRDFSVADRTVPAKDRGTYLAFTDKNSDGSRHLRQLAESGTSYVHLLPAFDIATIAEKKSGQQATDCDLASYAADSEKQQECLTAVAAKDAYNWGYDPYHYTVPEGSYATDANGTRRTVEFRRMVKSLNQDGLRVVMDVVYNHTAAAGQAGTSVLDRIVPGYYQRLLADGSVATSTCCANTATENAMMGKLVVDSLVTWAKEYKVDGFRFDLMGHQPKANILAVRKALDALTVAKDGVDGKKIILYGEGWNFGEVADDARFVQATQKNMAGTGIATFSDRARDAVRGGGPFDADPGVQGFGSGLYTDPNSSDANGTPAEQKARLLHYQDLIKVGLSGNLAKYRFTDSSGKEVTGSEVDYNGTGAGYADAPGDALAYADAHDNESLYDALTYKLPKGTPAGDRARMQVLAMATAALAQGPSLSQAGSDLLRSKSLDRNSYDSGDWFNAIHWNCQDGNGFGRGLPMAADNKSKWPYATPLLTSVKVGCDQIEGTSAGYQDLLRIRTTEPDFSLSTAGQVQSKLTFPLSGKDETPGVITMKLGDLVVVFNATPDQQEQTVAALAGKDYALHPVQAAGADPIVKSASYTAKSGMFAVPGRTVAIFSQVAR

SEQ ID NO: 120 - protein, 1079 aa, Klebsiella pneumoniae
SSSSPSGSPGSPGNPGNPGTPGTPDPQDVVVRLPDVAVPGEAAQASANQAVIHLVDIAGITSSTPADYATKNLYLWNNETCDALSAPVADWNDVSTTPTGSDKYGPYWVIPLTKESGCINVIVRDGTNKLIDSDLRVSFGDFTDRTVSVIAGNSAVYDSRADAFRAAFGVALADAHWVDKTTLLWPGGENKPIVRLYYSHSSKVAADSNGEFTDKYVKLTPTTVSQQVSMRFPHLASYPAFKLPDDVNVDELLQGETVAISAESDGILSSATQVQTAGVLDDTYAAAAEALSYGAQLTDSGVTFRVWAPTAQQVELVVYSADKKVVASHPMTRDSASGAWSWQGGSDLKGAFYRYAMTVYHPQSRKVEQYEVTDPYAHSLSTNSEYSQVVDLNDSALKPEGWDGLTMPHAQKTKADLAKMTIHESHIRDLSAWDQTVPAELRGKYLALTAQESNMVQHLKQLSASGVTHIELLPVFDLATVNEFSDKVADIQQPFSRLCEINSAVKSSEFAGYCDSGSTVEEVLTQLKQNDSKDNPQVQALNTLVAQTDSYNWGYDPFHYTVPEGSYATDPEGTARIKEFRTMIQAIKQDLGMNVIMDVVYNHTNAAGPTDRTSVLDKIVPWYYQRLNETTGSVESATCCSDSAPEHRMFAKLIADSLAVWTTDYKIDGFRFDLMGYHPKAQILSAWERIKALNPDIYFFGEGWDSNQSDRFEIASQINLKGTGIGTFSDRLRDAVRGGGPFDSGDALRQNQGVGSGAGVLPNELTSMTDDQARHLADLTRLGMAGNLADFVLIDKDGAVKKGSEIDYNGAPGGYAADPTEVVNYVSKHDNQTLWDMISYKAAQEADLDTRVRMQAVSLATVMLGQGIAFDQQGSELLRSKSFTRDSYDSGDWFNRVDYSLQDNNYNVGMPRSSDDGSNYDIIARVKDAVATPGETELKQMTAFYQELTALRKSSPLFTLGDGATVMQRVDFRNTGADQQTGLLVMTIDDGMQAGASLDSRVDGIVVAINAAPESRTLQDFAGTSLQLSAIQQAAGDRSLASGVQVAADGSVTLPAWSVAVLELPQGESQGAGLPVSSK

SEQ ID NO: 121 - protein, 546 aa, Rhizomucor pusillus
ATSDDWKGKAIYQLLTDRFGRADDSTSNCSNLSNYCGGTYEGITKHLDYISGMGFDAIWISPIPKNSDGGYHGYWATDFYQLNSNFGDESQLKALIQAAHERDMYVMLDVVANHAGPTSNGYSGYTFDDASLYHPKCTIDYNNQTSIEQCWVADELPDIDTENSDNVAILNDIVSGWVGNYSFDGIRIDTVKHIRKDFWTGYAEAAGVFATGEVFNGDPAYVGPYQKYLPSLINYPMYYALNDVFVSKSKGFSRISEMLGSNRNAFEDTSVLTTFVDNHDNPRFLNSQSDKALFKNALTYVLLGEGIPIVYYGSEQGFSGGADPANREVLWTTNYDTSSDLYQFIKTVNSVRMKSNKAVYMDIYVGDNAYAFKHGDALVVLNNYGSGSTNQVSFSVSGKFDSGASLMDIVSNITTTVSSDGTVTFNLKDGLPAIFTSAGATSPGGSSGSVEVTFDVYATTVYGQNIYITGDVSELGNWTPANGVALSSANYPTWSATIALPADTTIQYKYVNIDGSTVIWEDAISNREITTPASGTYTEKDTWDES

SEQ ID NO: 122 - protein, 481 aa, Bacillus licheniformis
VNGTLMQYFEWYTPNDGQHWKRLQNDAEHLSDIGITAVWIPPAYKGTSQADVGYGAYDLYDLGEFHQKGTVRTKYGTKGELQSAIKSLHSRDINVYGDVVINHKGGADATEDVTAVEVDPADRNRVISGEHLIKAWTHFHFPGRGSTYSDFKWYWYHFDGTDWDESRKLNRIYKFQGKTWDWEVSNEFGNYDYLMYADIDYDHPDVVAEIKRWGTWYANELQLDGFRLDAVKHIKFSFLRDWVNHVREKTGKEMFTVAEYWSNDLGALENYLNKTNFNHSVFDVPLHYQFHAASTQGGGYDMRKLLNGTVVSKHPLKSVTFVDNHDTQPGQSLESTVQTWFKPLAYAFILTRESGYPQVFYGDMYGTKGDSQREIPALKHKIEPILKARKQYAYGAQHDYFDHHDIVGWTREGDSSVANSGLAALITDGPGGAKRMYVGRQNAGETWHDITGNRSEPVVINSEGWGEFHVNGGSVSIYVQR

SEQ ID NO: 123 - protein, 484 aa, Aspergillus niger
LSAAEWRTQSIYFLLTDRFGRTDNSTTATCDTGDQIYCGGSWQGIINHLDYIQGMGFTAIWISPITEQLPQDTADGEAYHGYWQQKIYDVNSNFGTADDLKSLSDALHARGMYLMVDVVPNHMGYAGNGNDVDYSVFDPFDSSSYFHPYCLITDWDNLTMVQDCWEGDTIVSLPDLNTTETAVRTIWYDWVADLVSNYSVDGLRIDSVLEVEPDFFPGYQEAAGVYCVGEVDNGNPALDCPYQKVLDGVLNYPIYWQLLYAFESSSGSISNLYNMIKSVASDCSDPTLLGNFIENHDNPRFASYTSDYSQAKNVLSYIFLSDGIPIVYAGEEQHYSGGKVPYNREATWLSGYDTSAELYTWIATTNAIRKLAISADSAYITYANDAFYTDSNTIAMRKGTSGSQVITVLSNKGSSGSSYTLTLSGSGYTSGTKLIEAYTCTSVTVDSSGDIPVPMASGLPRVLLPASVVDSSSLCGGSGRLYVE

SEQ ID NO: 124 - protein, 586 aa, Aspergillus tamarii
ATPADWRSQSIYFLLTDRFARTDGSTTAACNTEDRKYCGGTWQGIIDKLDYIQGMGFTAIWITPVTGQLPQHTAYGDAYHGYWQQDIYSLNENYGTADDLKALSSALHERGMYLMVDVVANHMGYDGAGASVDYSVFKPFNSQEYFHSFCLIQNYEDQTQVENCWLGDNTVSLPDLDTTKDEVKNEWYDWVGTLVSNYSIDGLRVDTVKHVQKDFWPGYNKAAGVYCIGEVLDGDPAYTCPYQDVMDGVLNYPIYYPLLNAFKSTSGSMNDLYNMINTVKSDCPDSTLLGTFVENHDNPRFASYTNDIALAKNVAAFIILNDGIPIIYAGQEQHYAGGNDPANREATWLSGYATDSELYKLIASANAIRSHAISKDTGFVTYKNWPIYKDDTTIAMRKGTDGSQVVTILSNKGASGDSYTLSLGDTGYKAGQQLTEVIGCTTVTVGSDGKVPVPMAGGLPRVLYPTEKLADSKICSSSGATSPGGSSGSVEVTFDVYATTVYGQNIYITGDVSELGNWTPANGVALSSANYPTWSATIALPADTTIQYKYVNIDGSTVIWEDAISNREITTPASGTYTEKDTWDES

SEQ ID NO: 125 - protein, 603 aa, Acidomyces richmondensis
LTPAEWRAQSIYQVLTDRFALTNGSTTAPCNLNEYCGGTWQGIINKLDYIQGMGFTAIWISPVVENIPASDNTADGESYHGYWAQRIYEVNPNFGSAADLEALSEAIHARGMYLMVDIVTNHMGYDGCGTCVDYSVFDPFDNQSYFHPFCLINYNNATSIQVCWEGDNIVSLPDLRTEDSDVLGMWETWITQLVANYSIDGLRVDSMQQVDQAFWQPFMSAAGDLYAVGEVFNGDPTYTCPYQQYLPGVLNYPAYYWITQAFESTSGSIGNLVNGINEMKNDCLDTTLLGSFLENHDNPRFPSYTSDYSLDKNAIAFAMLQDGIPIVYEGQEQHYSGGSVPNNREDIWSSGYSTTSELYTFIKIINAIRTQALTKDSSYLTYKAYPVYSDSQTIAMRKGETYPIISVFTNSGASGSAYSITLSSSDTGFSENQSITELLTCTVSTTDSGGNLVVNISSGLPRVYYPTSAISGSTVCAESTSTLTISSPISTSTSDCTTASSVAVTFDETVTTTYGETIKLSGSISQLGDWNTQDAILLSAADYKSTDNVWFVTINLPAGIVFQYKYINVDSDGDVTWEADPNHTYTVSATCATAATIHDTWQN

SEQ ID NO: 126 - protein, 588 aa, Aspergillus bombycis
ATPADWRSQSIYFLLTDRFARTDGSTTATCNTEDRKYCGGTWQGIIDKLDYIQGMGFTAIWITPVTGQLPQDTAYGEAYHGYWQQDIYALNENHGTADDLKALSSALHERGMYLMVDVVANHMGYDGAGASVDYSVFNPFSSQDYFHSFCLIENYDDQTQSENCWLGDNSVSLPDLDTTKDEVKNEWYEWVGNLVSNYSIDGLRVDTVKHVQKDFWPGYNEAAGVYCIGEVLNGDPAYTCPYQDVMDGVLNYPIYYPLLNAFKSTSGSMNDLYNMINTVKSDCPDSTLLGTFVENHDNPRFASYTNDIALAKNVAAFIILNDGIPIIYAGQEQHYAGGNDPANREATWLSGYSTDSEIYKLIASANAIRNHAVSTDTGFVTYKNWPIYKDDTTIAMRKGTDGSQIVTILSNKGASGDAYTLSLGNTGYTAGQQLTEVIGCTTLTVGSDGNVPVPMAGGLPRVLYPTEKLGDSKICSSSGRGATSPGGSSGSVEVTFDVYATTVYGQNIYITGDVSELGNWTPANGVALSSANYPTWSATIALPADTTIQYKYVNIDGSTVIWEDAISNREITTPASGTYTEKDTWDES

SEQ ID NO: 127 - protein, 570 aa, Alternaria sp.
ADTSAWKSRSIYFVLTDRIARSSSDTGGGSCSNLGNYCGGTFKGLESKLDYIKNLGFDAIWITPVVANSAGGYHGYWAQDLYAVNSNYGTAADLKSLVNTAHSKGIYVMVDVVANHMGQGAISGNRPEPLNQDSSYHSACDINYSSQTSIEQCRIANLPDLNTQSSQIRSLLNTWISWLVNEYSFDGVRIDTVKHVEKDFWPGFASAAGVYSIGEVWDGNPTYLAEYARLMPGLLNYATYYPMNNFYQQKGSSQALVDMMNTVRDTFPDPSALGTFLDNHDNNRWLNQKNDVTLLKNALAFVILSRGIPIVYYGTEQGYAGGADPANREDLWRSSFNTNADLYQAIKKLNAARTSAGGLAGNDHTHLYVSSNAYAWSRANGNLVVLTTNAGSGSNAQHCFNTQKANGRWTNVYGNGATVTADGSGNICVNVANGEPVVLLVSTATPTSATPTSNPSPTTLLTTSTACPTSVSVSFTHRVTTVFGDTIKITGNTAQLGNWNPSNGVALSAASYTSSNPIWTLTLPLPAGSAIQYKFVKVSSGGTVTWESDPNRSYSVPGCQASASVSSQWQ

SEQ ID NO: 128 - protein, 551 aa, Rhizopus microsporus
SPITIRSQNSNDWSSRVIYQLLTDRFAKTVDDQSPCSDLGNYCGGSFQGIINHLDYIAGMGFDAIWISPIPQNAQGGYHGYWATNFSAINSNFGSSNDLKKLVQAAHAKNMYVMLDVVANHVGTPSTPNNYNGYTFNQGSYYHSYCDINYNDQTSVEQCWLSGLPDLNTENDYVVNTLYSTVSNWISEYGFDGIRIDTVKHVRKDFWDGYVKAAGVFATGEVLHGSVSYVAPYQSHVPSLINYPLYYPIYDVFTKAATMTRLKSGYNDIQSGGFSNLNLLLNFIDNHDNPRLLSKADQSLVKNALTYSMLIQGIPVVYYGTEQSYKGGNDPNNREPLWTSGYSSSSEMYQFIKQVIQIRKGSNATVTMDIDQADNVYVFQRGNYLAVVNNYGQGSTNSVTVKSGSFADGTVLKDVFSGATATVKNKSITFQLQNGNPAVFSPQGATSPGGSSGSVEVTFDVYATTVYGQNIYITGDVSELGNWTPANGVALSSANYPTWSATIALPADTTIQYKYVNIDGSTVIWEDAISNREITTPASGTYTEKDTWDES

SEQ ID NO: 129 - protein, 565 aa, Syncephalastrum racemosum
VPLSIIDKRAGVTTLSKRAAADDWKSRSIYQIVTDRFARSDGSTSGCGDLSNYCGGDYKGIQNQLDYIAGMGFDAIWISPIPENTDGGYHGYWAKNFEALNTNFGSADDLKALVTAAHGKGMYVMLDVVANHAGPTSGGDYSGFTFDSASNYHAQCDIDYENQTSIEQCWVADNLPDINTEDDTIVSKLHSIVSDWVTTYDFDGIRIDTVKHIRKDFWSGYEEAAGVFATGEVFDGDAAYVGPYQDQLSSLINYPLYYAIRDVFTAGSGFSRISDMLSSINSNFKDPSVLTTFVDNQDNARFLSVKSDTSLYKNALAFTILTEGIPVVYYGTEQGFKGGNDPNNREVLWTSNYDTSSDLYKFIKIVNDQVRQKSNKTVKLNVDVGTNTYAFTHGKNLIVVNNYGSGSTASVTVKVGDSIADGTKLVDAVSNITATVSGGSITFSLNNGLPALFVPSSGATSPGGSSGSVEVTFDVYATTVYGQNIYITGDVSELGNWTPANGVALSSANYPTWSATIALPADTTIQYKYVNIDGSTVIWEDAISNREITTPASGTYTEKDTWDES

SEQ ID NO: 130 - protein, 583 aa, Rhizomucor pusillus
ATSDDWKGKAIYQLLTDRFGRADDSTSNCSNLSNYCGGTYEGITKHLDYISGMGFDAIWISPIPKNSDGGYHGYWATDFYQLNSNFGDESQLKALIQAAHERDMYVMLDVVANHAGPTSNGYSGYTFDDASLYHPKCTIDYNNQTSIEQCWVADELPDIDTENSDNVAILNDIVSGWVGNYSFDGIRIDTVKHIRKDFWTGYAEAAGVFATGEVFNGDPAYVGPYQKYLPSLINYPMYYALNDVFVSKSKGFSRISEMLGSNRNAFEDTSVLTTFVDNHDNPRFLNSQSDKALFKNALTYVLLGEGIPIVYYGSEQGFSGGADPANREVLWTTNYDTSSDLYQFIKTVNSVRMKSNKAVYMDIYVGDNAYAFKHGDALVVLNNYGSGSTNQVSFSVSGKFDSGASLMDIVSNITTTVSSDGTVTFNLKDGLPAIFTSATGGTTTTATPTGSGSVTSTSKTTATASKTSTSTSSTSCTTPTAVAVTFDLTATTTYGENIYLVGSISQLGDWETSDGIALSADKYTSSDPLWYVTVTLPAGESFEYKFIRIESDDSVEWESDPNREYTVPQACGTSTATVTDTWR

SEQ ID NO: 131 - protein, 553 aa, Dichotomocladium hesseltinei
QPVNITKRASAADWRSRAIYQVLTDRFARTDGSTSGCSNLSNYCGGTFKGITNKLDYIANLGFDAIWISPIPTNSPGGYHGYWATDFYGINSNFGSSNDLKELVNAAHAKGMYVMLDVVANHAGPTSNGDYSGYTFGSSGLYHNRCSINYNDQRSIEQCWVADDLPDINTENNDNVNKPNNIVSTWVKTYGFDAIRIDTVKHVRKDFWPGYTSAAGVFATGEVFDGNPSYVADYQNYMESLINYPLYYALNDVFASGYSFSRLSNQRVANYHAFKDVSVLPIFIDNHDNPRFLNKKNDIAQFKNALTYVLLGEGIPVVYYGSEQAYAGGADPANREALWSSGFSTNSDMYQFIAKLNRVRQKSNKSVYMDLDVQNNVYAFMHGKSLVVLNNFGNGASRQVTVNVGAQVASNTRLTDVVSGTSVTVSGSSVTFTINNGLPAVFTVSGATSPGGSSGSVEVTFDVYATTVYGQNIYITGDVSELGNWTPANGVALSSANYPTWSATIALPADTTIQYKYVNIDGSTVIWEDAISNREITTPASGTYTEKDTWDES

SEQ ID NO: 132 - protein, 552 aa, Lichtheimia ramosa
RPFVKRATADDWRDRAIYQILTDRFARSDGSTDNCSDLSNYCGGNYQGIIQQLDYIEGMGFDAIWISPIPANADGGYHGYWATDFESLNDHFGSQDDLKALVDAAHERGMYVMLDVVANHAGPTNNGDYSGYTFGSSDLYHPQCSIDYSNQNSIEQCWVADNLPDIDTENDSNVNKLHDIVSTWVSTYGFDGIRIDTVKHVRKDFWPGYASAAGVFATGEVYDGDQTYVGAYQDYLDSLLNYPLYYALNDVFASGQGFQRLSNQRNAIMSAFKDVSVLTSFVDNHDVARFLSTKNDQALFKNALAFVLLGETIPVVYYGSEQGFAGGADPANREALWSSGYDTSSDLYQFIATINNNVRQKSGKKVYMDLDVQDNVYAFMHGDALVVLNNYGSGASNQVSVNVGAQVAESTSFTDAISGTSITVSSGSVTFTLDNGNPAIFVPAGATSPGGSSGSVEVTFDVYATTVYGQNIYITGDVSELGNWTPANGVALSSANYPTWSATIALPADTTIQYKYVNIDGSTVIWEDAISNREITTPASGTYTEKDTWDES

SEQ ID NO: 133 - protein, 587 aa, Penicillium aethiopicum
ARTADWKPRSIYQTMTDRFARTDGSTTSPCNTKAGLYCGGTWRGTIDHLDYIQGMGFDAVMISPIIENIEGRVDYGEAYHGYWPLNLDNLNSHFGTHQDLLDLSDALHSRGMYFMMDTVINNMAYITNGSDPATDIDYSVFTPFNNADYFHPYCTMNWSVPAIAQRCNTGDDTVALPDLFTEHEDVQQLLIKWANKAIKTYSIDGLRIDAAKHVNPDFLRKFSDGVDIFMTGEVLEGSVSIMEDYQSNYINSLPNYPIYFEILSAFTNGNTSQLAIAVENMRVAIPDVNAMASFSENHDKPRIASYNDDMSIAKNVLVFTMLFDGIPMIYQGQEQHLKGDGVPHNREAIWLSKYDTEAELYKLIAKLNRIRNHAGYLGSDYFEDATHPIYQGSSELAFTKGVQGRQVVMVLSNQPSTSGRYALDLAVSYNAGTELMDVLNCNNYTVDNQGVLRVDMDKGEPRVFFPRKYMEGSGLCGYSGATSPGGSSGSVEVTFDVYATTVYGQNIYITGDVSELGNWTPANGVALSSANYPTWSATIALPADTTIQYKYVNIDGSTVIWEDAISNREITTPASGTYTEKDTWDES

SEQ ID NO: 134 - protein, 597 aa, Subulispora sp.
LTPAEWGSQSIYQVLTDRFALTDGSTTASCDLNTYCGGTWLGIQNHLDYIQGMGFTAIWISPIVTNIAGDSVDGDSYHGYWAQDITTVNSAFGTEQDLINLSAALHERGMYLMVDVVNNHMGYLGCGTCVDYSEYTPFNEESYYHPYCPTDYSNLTSIQVCWEGDNIVSLPDLRTEDSDVRSMWYDWITPLVAKYSIDGLRMDSAEHVEKSFWPGWVSASGVYNVGEVDEGDPTIFPDWLNYIDGTLNYPAYYWITQAFQSTSGSISNLVTGVNQLKASMKTSTFGSFLENHDQPRFPSLTSDTDLAKNAIAFAMLADGVPIVYYGQEQGYSGGGVPNDREPLWTSGYSTTSAGYTFIKTINAVRHLAVTQDTAYVAYQAYPIYSDSRVIAMKKSSVLAVFSNIGSSGSGYSITLPAGAFAASQALTDAVSCQTYTADASGGLTFTFGQAPSVFYATASLAGSGLCGTTGTGGSTGTTTASETGGSSPTSTACASVPVTFNEKVTTVVGETIKISGSVAALGDWATGSAVALSAASYTSSNPQWDVTISFAPGTVIEYKYINVASSGAVTWEADPNHTYTVPASCATAAVVSDTWQT

SEQ ID NO: 135 - protein, 601 aa, Trichoderma paraviridescens
LTAAQWRSQSIYQVLTDRFSQTNGATNSACNAGNQVYCGGTWQGIIKNLDYIKSMGFTAIWISPVVENLAGNSADGEAYHGYWAQDIYQVNTNFGSAADLRALSEALHNAGMYLMVDIVTNHMGYLGCGTCVQYNTFNPFNSQSYYHPFCLINFNSSNMTQIQNCWEGDNTVSLPDLATENANVLSMWQTWITQLVANYTIDGLRMDSCFELNYGYFEPFQSSANVYIVGEVDNGDPAIVCPYQKNYGLNTLNYPAYYWITQAFQSTSGSISNLVNGLNTMKSECSDTTLLGSFMENHDNPRFPSLTSDISLAKNAIAFTMLADGIPIIYEGQEQHLNGGGVPNNREAIWLSGYSTSAVLYTHIKALNQIRSQAIKQNSAYVTTQAAVTYSDSSTIVTRKGSTGSQIVGVFSNKGANGNSYTLTLPSADTGFTSNEQVVEILSCTAYTTDSSGNLAVAMAGGLPRVFYARSSLSGSGICPNLGSGGGTPTSTPPTSCTAIPVTFDEKVTTTFGQTIKIAGDISALGNWNTANAVTLSAANYTSSNPLWAITLNLAPGQVVEYKYINVAQNGGVTWEADPNHTYTVPSACTAQPTVANTWQG

SEQ ID NO: 136 - protein, 598 aa, Byssoascus striatosporus
LSADDWRAQSIYQLLTDRFALTNGSTTAPCDTEEQIYCGGSWQGIIDKLDYIQGMGFTAIWISPVVENLSGDSADGEAYHGYWAQNVYEVNPNFGATSDLVALSQVVHDKGMYLMLDVVTNHMGYLGCGTCVDYSVFNPFNEESYYHPFCLIDYDNTTSIEVCWEGDNIVSLPDLRTEDSDVLSTWESWVTELVSNYTVDGIRLDSTEELDQAFLPPFESAAGVYIVGEVDNGDPAVVCPYQEYVSGVLNYPAYYWITQAFESTSGSIGNLVNGINTMKSDCSDTSLLGSFLENHDQPRFASLTSDISLAKNAIAFSMLQDGIPIVYAGEEQHYSGGAVPNDREALWLSGYPTSSTLYTWITSLNQIRSHAIATNSSYLTYNAYPVYSDDSTIVMRKGFADNQIVSVYTNQGADATAYTLDLPSTDTGFTASQSLVEIGGCTTTATDDSGNLAVAMASGLPRIYYPAAGLSGSGVCGQLGSGGGTPTSTPPTSCTAIPVTFDEKVTTTFGQTIKIAGDISALGNWNTANAVTLSAANYTSSNPLWAITLNLAPGQVVEYKYINVAQNGGVTWEADPNHTYTVPSACTAQPTVANTWQG

SEQ ID NO: 137 - protein, 615 aa, Aspergillus brasiliensis
LSAAEWRTQSIYFLLTDRFGRTDNSTTATCNTGDQIYCGGSWQGIINHLDYIQGMGFTAIWISPITEQLPQDTSDGEAYHGYWQQKIYDVNSNFGTADDLKSLSDALHARGMYLMIDVVPNHMGYAGSGNDVDYSVFDPFDSSSYFHPYCLITDWDNLTMVQDCWEGDTIVSLPDLNTTETVVRTIWYDWVADLVSNYSVDGLRIDSVLEVEPDFFPGYQEAAGVYCVGEVDNGNPALDCPYQDYLDGVLNYPIYWQLLYAFESSSGSISDLYNMIKSVASDCSDPTLLGNFIENHDNPRFAYYTSDYSQAKNVLSYIFLSDGIPIVYAGEEQHYSGGDVPYNREATWLSGYDTSAELYTWIATTNAIRKLAIAADSSYITYANDPIYTDSNTIAMRKGTSGSQVITVLSNKGSSGSSYTLTLSGSGYTSGTKLIEAYTCTSVTVDSNGDIPVPMASGLPRVLLPASVVDDSSLCGGSGSSTSTTTSTATATTTSKTSTTSSSSSSSSCTASATAIPITFEELVTTTYGEEIYLSGSISQLGDWDTSDAVKLSADDYTSSNPEWSVTVTLPVGTTFEYKFIKVESGGSVTWESDPNREYTVPECGSGETVVDTWR

SEQ ID NO: 138 - protein, 604 aa, Penicillium subspinulosum
ALSAEWRTQSIYFLLTDRFGRTDNSTTATCDTGDQIYCGGSWQGVINHLDYIQGMGFTAIWISPITEQLSGDTSDGEAYHGYWQQKIYNVNSNFGTADDLVALSDALHARDMYLMLDVVPNHMGYDGDGDDVDYSVFDPFDSSSYFHPYCLITDYDDIEMVQDCWEGDTIVSLPDLNTTETVVQDIWYAWVADLVANYSVDGLRIDSVLEVQPAFFPAYQSAAGVYCVGEVDNGDPTLDCPYQDYLDGILNYPIYYQLLYAFESSSGSISDLYDMINSVASDCSDPTLLGNFIENHDNPRFAYYTSDYSQAKNVASFIFLSDGIPIVYAGQEQHYSGGDVPYDREATWLSGYSTTAELYTWIATTNSIRKLAISLDDDYITYVNDPFYTDENTIAMRKGTSGLQVITVLSNLGADGSAYTLTLSGSGYDSGTDLIEVYTCTSVTVDSSGDIAVPMESGLPRVFLPESSIKDSDLCSGTTTTTTSTAATATATSTSTCTAATEVSIIFEELVTTTYGEEIYLSGSISELGSWDTSDALELSAANYTSSNPEWYLEVTLPVGTSFEYKFIMIESDGTVVWESDPNRSYTVPSACSGAVETVVDTWR

SEQ ID NO: 139 - protein, 606 aa, Penicillium antarcticum
LTPAEWRSQSIYFMLTDRFGRSDNSTTAACNVSDRTYCGGTWQGIINHLDYIQGMGFTAIWITPVTEQLPQDTGDGEAYHGYWQQNIYEVDSNLGTAADLLALSEALHARGMYLMVDVVANHMGYAGAGSSVEYSVFHPFSSSSYFHSYCLISNYDDQSNVEDCWLGDTIVSLPDVDTTQTAVQTLWYDWIGDLVSNYSIDGLRIDTVKHVQKSFWPGYNDAAGVYCVGEIFDGDPAYTCDYQNYMDGVLNYPIYYQLLYAFQSSSGSISDLYDMINSVKSDCADPTLLGNFIENHDNPRFASYTSDYSQAKNVISFLFLSDGIPIIYSGQEQHYSGGADPANREATWLSGYSTTAELYKYIATTNRIRKAAVSADSSYITTKNVPFYQDSHTLAMKKGSSASPVITVLSNYGSSGSSYTLSLSGSGYSSGTNLMEMYTCTSVTVDSSGNIAVPMASGLPRVLMLASSASSICASSTTTSTATVATQTTTLTTTGTSCTQATVLPVLFKELVTTTYGQNVYISGSISQLGSWDTSSAIALSASSYNSSNPLWQVAITLPVGTSFQYKFLEKTTGSTTIQWESDPNRSYTVPTGCVGTTATAIATWR

SEQ ID NO: 140 - protein, 609 aa, Penicillium coprophilum
LTPAEWRSQSIYFLLTDRFGRTDNSVTANCNVNDRVYCGGTWQGIINQLDYIQGMGFTAIWITPVTKQLSQNTGDGTSYHGYWQQDIYNVNPNHGTSDDLLALSKALHARGMYLMVDVVANHMGYAGAGNNVDYSVFTPFNSASYFHSYCLISNYNDQSNVENCWLGDTTVSLPDLDTTQSSVQTLWNNWISDLVSKYSIDGLRVDTVKHVQKSFWPAFNRAAGVYSVGEVFDGSPSYTCDYQKYMDGVLNYPMYYPLLRAFQSTSGSISDLYNMIGTLSSTCADSTLLGNFIENHDNPRFPSYTSDYSQAKNVLSFLFLSDGIPIVYSGQEQHYSGGSDPANREALWLSKYSTTAELYKYIATTNKIRKAAVAADSSYITSKNVAFYQDSHTLAMKKGSGSSPVITVLSNAGSSGSSYTLYLSGSGYSSGTQLMELYTCTSVTVDSSNKIAVPMASGLPRVFVLASSVSNSGLCGSSTPTTTATTATTATQTTTATTTAGGCTQATALPVLFKELVTTSYGQDIYISGSISQLGTWDTSKAVALSADSYTSSNPLWQATITLPVGTTFQYKFIKKANGAITWESDPNRSYTVPTGCSGSTATVTASWK

SEQ ID NO: 141 - protein, 602 aa, Penicillium olsonii
LTPAEWRSQSIYFLLTDRFGRDDNSTTATCNTGDRTYCGGTWQGIINQLDYIQGMGFTAIWITPVTEQLSANTGYGTAYHGYWQQDIYEVNPNHGSSADLKALSAALHARGMYLMVDVVANHMGYNGIGSSVDYSVFNPFSSSSYFHSYCLISNYNDQSNVENCWLGDTTVSLPDLDTTQTAVQTIWNEWITDLVSNYSIDGLRIDTVKHVQKSFWPGFNDAAGVYSVGEIFDGNPSYTCDYQNYLDGVLNYPIYYPLLYAFQSTSGSISDLYNMINTVASDCADSTLLGNFIENHDNPRFPSYTGDYSQAKNVISYLFLSDGIPIIYSGQEQHYSGASDPANREALWLSGYSTTAELYKWIATTNKIRKLAVSADSSYITSKNSPFYQDSHTLGMKKGSVITILSNNGASGSSYTLSLSGSGYSSGTKLMELYTCTSITVDSSGNIPVPMVSGLPRALIPASSIGSNGLCGSTTSPTTTAATQTTTATTTGTCTQATALPVLFKELVTTSYGQNVYISGSISQLGNWDASSAIALSASSYTSSNPLWQVTITLPVGTKFEYKFIEKSSGSATATWESDPNRSYTVPTGCAGTTATVTATWR

SEQ ID NO: 142 - protein, 621 aa, Penicillium vasconiae
LTAAEWRTQSIYFLLTDRFGRTDNSTTATCSVSDRIYCGGSWQGIINHLDYIQGMGFTAIWITPVTEQLSQDTGDGEAYHGYWQQEIYNVNTNYGTAADLLALSKALHSRGMYLMVDVVANHMGYDGAGNTVDYSVFNPFDSSSYFHSYCEISDYSNQTNVEDCWLGDTTVSLPDLDTTLSSVQTIWYNWVTELVSNYSIDGLRIDTVKHVQKSFWPGYNSAAGVYCVGEVFDGDPAYTCPYQSYLDGVLNYPIYYQLLYAFESTSGSISSLYNMINSVASDCSDPTLLGNFIENHDNPRFASYTSDYSQAKNVISFIFFSDGIPIVYAGQEQHYSGGSDPANREATWLSGYDTTATLYKYITSTNKIRSLAISKDTAYITSKNNAFYTDSNTIAMKKGSSGSQVITVLSNRGSSGSSYTLTLSGSGYSSGTQLMEMYTCTAVTVDSSGNIAVPMASGLPRIYMLASSACSICSSSCSTTTTTSTTSTSTTTASTLKTTTSTTSATSTTSTSCTQATALPVLFKEIVTTSYGQNIYISGSISQLGSWDTSNAVALSADQYTSSNNLWYVVVTIPVGTSFEYKFIEETSGSSTITWESDPNRSYTVPTGCAGSTATVTATWR

SEQ ID NO: 143 - protein, 615 aa, Penicillium sp.
LTAAEWRSQSIYFLLTDRFGRTDNSTTATCNVSDRIYCGGSWQGIINHLDYIQGMGFTAIWITPVTEQLSQDTGDGEAYHGYWQQEIYNVNTNYGTAADLLALSKALHSRGMYLMVDVVANHMGYDGAGNTVDYSVFNPFDSSSYFHSYCEITDYSNQTNVEDCWLGDTTVSLPDLNTTLSSVQTIWYDWVAALVSNYSIDGLRIDTVKHVQESFWPEYNSAAGVYCVGEVFDGDPAYTCPYQNYLDGVLNYPIYYQLLYAFESTSGSISDLYNMINSVASDCSDPTLLGNFIENHDNPRFASYTSDYSQAKNVLSFIFFSDGIPIVYAGQEQHYSGGSDPANREATWLSGYDTSAELYTWITSTNKIRSLAVSKDTAYITSKNDAFYTDSNTIAMKKGSGGSQVVTVLSNRGSSGSSYTLTLSGSGYSSGTKLMEMYTCTAVTVDSSGNIAVPMASGLPRVYMLASSACSICSSACSTTTTSSTTSTATTTSTTLKTTTTTTSTSCTQATALPVLFKEIVTTSYGQNIYISGSISELGDWDTSNAVALSADQYTSSNNLWYVVVTIPVGTSFEYKFIEETSGSSSITWESDPNRSYTVPTGCAGSTATVTATWR

SEQ ID NO: 144 - protein, 606 aa, Heterocephalum aurantiacum
LTAAEWRQQSIYFLLTDRFARTDGSTTAACNLSQRAYCGGSWQGIINHLDYIQGMGFTAIWITPVTKQIEASTSDGTAYHGYWQQDIYNINSHYGTADDLRALSSALHSRGMYLMIDVVANHMGYPGAGTSVDYSIFTPFGSSSYFHSYCQITDYDNQSNVENCWLGDNVVSLPDLNTQNSNVRNLWYDWVEELVANYSVDGLRVDTVKHVEKDFWPSYNAAAGVYCVGEVFHGDPAYTCPYQNYMDGVLNYPIYYQLLYAFQSSSGSITDLYNMINSVASDCKDPTTLGNFIENHDNPRFPSYTSDMSQAKSVIAFLFLSDGIPIIYAGQEQHYSGGADPNNREAIWLSGYSTSSTLYQFISSTNSIRKLAISKDSSYLTSRNNPFYTDSNTIAMRKGSSGSQVITVLSNKGSSGNSYTLTLTNHGYSSGAQLTELYTCSSIQVASSGGLAVPMASGLPRVLVPSSWIQGSGLCGGGSTTTTTTATTTTTTTTSTSSCAAATSLAVVFNELVTTYYGENIFIAGSISQLGSWDTGKSVALSASQYTSSNPLWTATVSLPVGTSFQYKFIKKEPDGQVVWESDPNRSYTVPAGCAGTTQTVNTSWR

SEQ ID NO: 145 - protein, 602 aa, Neosartorya massa
LTPAEWRSQSIYFLLTDRFGREDNSTTAACDVTQRLYCGGSWQGIINHLDYIQGMGFTAIWITPVTEQFYEDTGDGTSYHGYWQQNIYEVNYNYGTAQDLKNLADALHARGMYLMVDVVANHMGYDGAGNTVDYSVFTPFDSSSYFHPYCLISDYSNQTNVEDCWLGDTTVSLPDLDTTDTTVRTIWYDWVKGLVANYSIDGLRIDTVKHVEKDFWPGYNDAAGVYCVGEVFSGDPTYTCPYQNYLDGVLNYPIYYQLLYAFESTSGSISNLYDMINSVASDCADPTLLGNFIENHDNPRFASYTSDYSQAKNVISFIFFSDGIPIVYAGQEQHYSGGADPANREAVWLSGYSTSATLYSWIASTNRIRKLAISKDAAYITSKNNPFYYDSNTLAMRKGSIAGAQVITVLSNKGSSGSSYTLSLSGTGYSAGASLVEMYTCTTLTVDSSGNLPVPMASGLPRVLVPSSWVSGSGLCGSGSTTTTTTTATATTTACTSATALPIVFEEVVTTTYGENVYLTGSISQLGNWDTSSAIALSASKYTSSNPEWYVTVTLPVGTSFQYKFFKKESDGSIVWESDPNRSYTVPTGCAGTTVTVSDTWR

SEQ ID NO: 146 - protein, 588 aa, Penicillium janthinellum
ATPAQWRSQSIYFMLTDRFARTDGSTTAPCDTSQRAYCGGTWQGIIDKLDYIQGMGFTAIWITPVTGQLDGDTGDGTAYHGYWQQDIYSLNSNYGTASDLKALASALHARGMYLMVDVVANHMGYNGAGNTVDYSVFDAFNSNQYFHSYCEVTNYSNQTNVEDCWLGDTTVSLPDLNTELSSVQSIWYNWVGSLVSNYSIDGLRVDTVKHVQKDFWPGYNKAAGVYCVGEVFDGDASYTCPYQEVMDGVLNYPMYYPLLRAFQSTSGSMSDLYNMINTVKSTCSDSTLLGTFVENHDNPRFASYTNDMSLAKNVAAFTIMADGIPIIYAGQEQHYSGGSDPANREAVWLSGYNTDSALYKLIAKVNAIRSYAISQSASYVTYKNYPIYQDASTLAMRKGSSGTQTITVLSNRGASGSQYTLSLGNTGYSTGTTLTEIITCAKITVDSSGNVPVPMASGEPRILYPSSSIKGSAICASSGRGATSPGGSSGSVEVTFDVYATTVYGQNIYITGDVSELGNWTPANGVALSSANYPTWSATIALPADTTIQYKYVNIDGSTVIWEDAISNREITTPASGTYTEKDTWDES

SEQ ID NO: 147 - protein, 589 aa, Aspergillus brasiliensis
ATPAEWRSQSIYFLLTDRFARTDNSTTASCDLSARQYCGGSWQGIINQLDYIQGMGFTAIWVTPVTAQIPQDTGYGQAYHGYWQQDAYALNSHYGTADDLKALATALHSRGMYLMVDVVANHMGHNGTGSSVEYSVYNPFNAKKYFHNLCWISNYDNQTNVEDCWLGDNTVALPDLDTTRTDVKNMWYDWVKSLVSNYSVDGLRVDTVKNVQKNFWPGYNNASGVYCIGEVFDGDASYTCPYQDDLDGVLNYPMYYPLLRAFKSTTGSISDLYNMINTVKSTCKDSTLLGTFIENHDNPRFANYTSDMSLAKNVATFTILADGIPIIYAGQEQHYSGGNDPYNREATWLSGYKTTSELYTHIAASNKIRTHAIKQDSGYLTYKNYPIYQDTSTLAMRKGYNGTQTITVLSNLGASGSSYTLSLPGTGYTAGQKITEIYTCTNLTVNSNGSVPVPMKSGLPRILYPTDKLVNGSSFCSSSGRGATSPGGSSGSVEVTFDVYATTVYGQNIYITGDVSELGNWTPANGVALSSANYPTWSATIALPADTTIQYKYVNIDGSTVIWEDAISNREITTPASGTYTEKDTWDES

SEQ ID NO: 148 - protein, 588 aa, Aspergillus westerdijkiae
ATPAQWRSQSIYFLLTDRFARDDGSTTATCNTEDRKYCGGTWQGIIDQLDYIQGMGFTAIWITPVTAQLTEDTKYGDAYHGYWQQDIYSLNENYGTADDLKALADALHERDMYLMVDVVANHMGYAGAGDSVDYSVFNPFNSQDYFHSFCLIQDYNDQTQSEDCWLGDNSVSLPDLDTTKSEVQDIWYDWVGGLVSNYSIDGLRIDTVKHVQKEFWPGYNDAAGVYCIGEILDGDASYTCPYQEVLDGVLNYPIYYPLLNAFKSTSGSISDLYNMINTVKSDCPDSTLMGTFIENHDNPRFASYTDDIALAKNVAAFTILADGIPIVYAGQEQHYAGGEDPANREATWLGKYNTDSELYKLIAASNAIRNHAISTDKEYVNYKNYPIYKDDSTIAMRKGFDGAQIITVLSNQGSSGSSYTLSLGDTGFSSGDKLTEIYTCTAVTVDSDGKVPVPMDGGAPRALFPTEKLSGSSLCSGSGRGATSPGGSSGSVEVTFDVYATTVYGQNIYITGDVSELGNWTPANGVALSSANYPTWSATIALPADTTIQYKYVNIDGSTVIWEDAISNREITTPASGTYTEKDTWDES

SEQ ID NO: 149 - protein, 476 aa, Hamigera avellanea
ATPADWRSRSIYFILTDRFARTDGSTTAECDTSARAYCGGTWRGIINKLDYIQNMGFTAIWITPVTAQLPGSTGHGSAYHGYWQQDIYSLEPNYGTADDLRALASALHERNMYLMVDVVANHMGWAGSGDSVDYSVFNPFDSADYFHPYCLISNYEDQTEVENCWLGDTNVALVDLDTTRSDVQNIWYEWVDSLVGNYSIDGLRIDTVRHVQKDFWPGFNDAAGVYSVGEVFSGDTAYTCPYQEVLDGVLNYPIYYPLLRAFQSTSGSINDLYNMINTVKSDCADSTLMGTFLENHDNPRFASYTSDVALAKNAIAFTILSDGIPIIYAGQEQHYSGGNDPANREAVWLSGYSTDSELYSFVAVTNQIRNYAISQDQGYVTWKNVPIYQDTSTLAMRKGTDGSQVITVLSNLGASGSSYTLTLGGSGYSSGQQLTEIFSCATVTVDSSGNIPVPMGSGQPKVFYPTAGLGGSGICQ

SEQ ID NO: 150 - protein, 586 aa, Hamigera avellanea
ATPADWRSRSIYFILTDRFARTDGSTTAECDTSARAYCGGTWRGIINKLDYIQNMGFTAIWITPVTAQLPGSTGHGSAYHGYWQQDIYSLEPNYGTADDLRALASALHERNMYLMVDVVANHMGWAGSGDSVDYSVFNPFDSADYFHPYCLISNYEDQTEVENCWLGDTNVALVDLDTTRSDVQNIWYEWVDSLVGNYSIDGLRIDTVRHVQKDFWPGFNDAAGVYSVGEVFSGDTAYTCPYQEVLDGVLNYPIYYPLLRAFQSTSGSINDLYNMINTVKSDCADSTLMGTFLENHDNPRFASYTSDVALAKNAIAFTILSDGIPIIYAGQEQHYSGGNDPANREAVWLSGYSTDSELYSFVAVTNQIRNYAISQDQGYVTWKNVPIYQDTSTLAMRKGTDGSQVITVLSNLGASGSSYTLTLGGSGYSSGQQLTEIFSCATVTVDSSGNIPVPMGSGQPKVFYPTAGLGGSGICQSSGATSPGGSSGSVEVTFDVYATTVYGQNIYITGDVSELGNWTPANGVALSSANYPTWSATIALPADTTIQYKYVNIDGSTVIWEDAISNREITTPASGTYTEKDTWDES

SEQ ID NO: 151 - protein, 576 aa, Meripilus giganteus
RPTVFDAGADAHSLHARAPSGSKDVIIQMFEWNWDSVAAECTNFIGPAGYGFVQVSPPQETIQGAQWWTDYQPVSYTLTGKRGDRSQFANMITTCHAAGVGVIVDTIWNHMAGVDSGTGTAGSSFTHYNYPGIYQNQDFHHCGLEPGDDIVNYDNAVEVQTCELVNLADLATDTEYVRGRLAQYGNDLLSLGADGLRLDASKHIPVGDIANILSRLSRSVYITQEVIFGAGEPITPNQYTGNGDVQEFRYTSALKDAFLSSGISNLQDFENRGWVPGSGANVFVVNHDTERNGASLNNNSPSNTYVTATIFSLAHPYGTPTILSSYDGFTNTDAGAPNNNVGTCSTSGGANGWLCQHRWTAIAGMVGFRNNVGSAALNNWQAPQSQQIAFGRGALGFVAINNADSAWSTTFTTSLPDGSYCDVISGKASGSSCTGSSFTVSGGKLTATVPARSAIAVHTGQKGSGGATPTSAPSTTPTSGTVSMTFAEQATTTFGENIFLVGSISQLGNWNPASAIALSSAAYPTWSVSVNIPAGTTFQYKFIRKETDGSVVWESDPNRQATAPASGTTTLTSSWR

SEQ ID NO: 152 - protein, 575 aa, Cerrena unicolor
RPLNASNALDARAPSGAKSVIIQMFEWTWDSVAAECTNFIGPAGYGFVQVSPPQETIQGDQWWTDYQPVSYILTSKRGTRDQFAAMIDTCHDAGVKVIVDTIWNHMAGVESGTGVAGSSFTHYNYPGIYQNQDFHHCGLESGDDIVNYDNAQEVQTCELVNLADLATETDYVRGRLAEYGNDLLSLGADGLRLDAAKHIAVGDLANIIGRLNSTPYITQEVIFGSGEPITPNQYTGNGDVQKFRYTSALKDAFLNGDISSLQDFENRGWVAGSGANVFVTNHDTERNGNSLNNNSPNNAYTLAMIFSLAHPYGTPSILSSYSGFTDTDAGAPNGGAGTCSGSGGSNGWLCQHRWTAVAGMVGFRNTVGSAALNNWVSPQSSQIAFGRGALGFVAINNGDSTWSTTFTTSLPDGTYCDVITGTSSSGSCTGSSFTVSGGTFTANVAARDAVAIHTGATGTGSGSGNTSTGSGGTTSDTVSVSFAETATTTFGENIFLVGSISQLGAWDPASAIALSSASYPTWTVTVTLPAGTTFEYKFIRKETDGSVVWESDPNRQATTPSSSDAATTTLSTSWR

SEQ ID NO: 153 - protein, 562 aa, Physalacria cryptomeriae
APFLELQVRAPSSTKQVIIQMFEWTWDSVAAECTDFIGPAGYGYVQVSPPAEHITGDQWWTDYQPVSYILTSKRGNRSQFANMVTTCHTAGVLVIADALFNHMAGIESGTGTAGSSFTHYDYPGIYQTQDFHHCGLTSGDDISDYSSQAQVQTCELVNLADLATDTEYVRAKLASYANDLISLGVNGLRLDAAKHIATDDIKNILSRLSSTVYITQEVIFGSGEPVTPSMYTQNGDVQEFRYTSTLQSAFSGGDISQLQNLDSKGWIAGTSANVFVANHDTERGGSSLNYKSSSNTYVTATIFSLAHPYGTPTILSSYEFSDTDAGSPNGGAGTCSTTGGANGWLCQHRWVAFSGMVGFHNNVGTASLTNWVSPQSNQIAFERSGKGFVAINNADSAWTATFTTSLAAGSYCDVITGTSNGSACSGTSYTVSGGSFSATVAARSAVAIHTGATGSGSGGGGGSTGSVAITFQETATTTLGENIFLVGSISQLRTWAPASAIALSSASYPTWSVTVSIPAGTTFEYKFIRKESDGSVVWESDPNRSATASSSASTQTILTSWR

SEQ ID NO: 154 - protein, 578 aa, Lenzites betulinus
RPASTVFHGAETRSLDARAPSGSKDVIIQMFEWTWDSVAAECTNFIGPAGYGFVQGSPPQEHIQGAQWWTDYQPVSYTLTSKRGDRTSFANMIQTCHTAGVGVIVDTLFNHMAGVDSGTGVAGSSFTHYNYPGIYQNQDFHHCGLEPGDDIVNYDNAVEVQTCELDNLADLATETEYVRGRLAQYGNDLLSLGADGMRLDAAKHIAVGDIANILSRLNRTVYITQEVIFGAGEPITPNQYTGNGDVQEFRYTSALQDAFLNSGIANLQVLENRGWVPGSGANVFVTNHDTERNGASLNNNSPSNTYVTAMIFSLAHPFGTPSILSSYSGFTDTDAGAPNGGVGTCSGSGGTNGWLCQHRWTAVAGMVGFRNQVGSAALGNWQSPQSQQIAFGRGALGFVAINNADSAWSATFTTSLPDGSYCDVISGQTSGSTCTGSSFTVSGGSLSATVPARSAIAVHTGQKGTGSGSGTGTGGGGSTGSGNVAVNFAETATTTFGENIFVVGSISQLGTWNTANAIALSSPSYPTWTVSISIPAGTTFQYKFIRKETDGSVVWESDPNRQATAPASGSTTLSTSWR

SEQ ID NO: 155 - protein, 571 aa, Trametes ljubarskyi
RPATFDAADARSVQPRAPSGSKDVIIQMFEWTWDSVAAECTNFIGPAGYGFVQGNPPQEHIQGDQWWTDYQPVSYILTSKRGDRTAFANMISTCHAAGVGVIVDTIFNHMSGVDSGTGVAGSSFTHYNYPGIYQNQDFHHCGLEPGDDIVNYDNAVEVQTCELENLADLATDTEYVRGRLAQYANDLLSLGADGLRLDAAKHIPTGDIANILSRLNRSVYITQEVIYGDGEPITPNQYTGNGDVQEFRYTTALKNAFLGGGISSLQSFDNLGWVPGTGANVFVTNHDTERNGNSLNNNSPSNTYVTAMIFSLAHPYGTPTILSSYSGFTNTDAGAPNGGTGTCSGSGGANGWLCQHRWTAVAGMVGFRNNVGSAALTNWQSPQSQQIAFGRGALGFVAINNADSAWSTTFTTSLPDGSYCDVVSGTSSNGGCTGSSFSVSGGSLTATVPARSAIAIHTGETGSGSNSGGGSGGSGTVTINFAETATTTFGENIFVVGSIPQLGSWNPANAIALSSASYPTWTVSVSVPAGTTFEYKFIRKETDGSVVWESDPNRSDTAPASGTQTITTSWR

SEQ ID NO: 156 - protein, 451 aa, Bacillus subtilis
GPAAASAETANKSNELTAPSIKSGTILHAWNWSFNTLKHNMKDIHDAGYTAIQTSPINQVKEGNQGDKSMSNWYWLYQPTSYQIGNRYLGTEQEFKEMCAAAEEYGIKVIVDAVINHTTFDYAAISNEVKSIPNWTHGNTQIKNWSDRWDVTQNSLLGLYDWNTQNTQVQSYLKRFLERALNDGADGFRFDAAKHIELPDDGSYGSQFWPNITNTSAEFQYGEILQDSASRDAAYANYMDVTASNYGHSIRSALKNRNLGVSNISHYAYDVSADKLVTWVESHDTYANDDEESTWMSDDDIRLGWAVIASRSGSTPLFFSRPEGGGNGVRFPGKSQIGDRGSALFEDQSITAVNRFHNVMAGQPEELSNPNGNNQIFMNQRGSHGVVLANAGSSSVSINTPTKLPDGRYDNKAGAGSFQVNDGKLTGTINARSVAVLYPDDIEIRCNTFFQ

SEQ ID NO: 157 - protein, 633 aa, Bacillus subtilis
GPAAASAETANKSNELTAPSIKSGTILHAWNWSFNTLKHNMKDIHDAGYTAIQTSPINQVKEGNQGDKSMSNWYWLYQPTSYQIGNRYLGTEQEFKEMCAAAEEYGIKVIVDAVINHTTSDYAAISNEVKSIPNWTHGNTQIKNWSDRWDVTQNSLLGLYDWNTQNTQVQSYLKRFLDRALNDGADGFRFDAAKHIELPDDGSYGSQFWPNITNTSAEFQYGEILQDSASRDAAYANYMDVTASNYGHSIRSALKNRNLGVSNISHYASDVSADKLVTWVESHDTYANDDEESTWMSDDDIRLGWAVIASRSGSTPLFFSRPEGGGNGVRFPGKSQIGDRGSALFEDQAITAVNRFHNVMAGQPEELSNPNGNNQIFMNQRGSHGVVLANAGSSSVSINTATKLPDGRYDNKAGAGSFQVNDGKLTGTINARSVAVLYPDDIAKAPHVFLENYKTGVTHSFNDQLTITLRADANTTKAVYQINNGPETAFKDGDQFTIGKGDPFGKTYTIMLKGTNSDGVTRTEKYSFVKRDPASAKTIGYQNPNHWSQVNAYIYKHDGSRVIELTGSWPGKPMTKNADGIYTLTLPADTDTTNAKVIFNNGSAQVPGQNQPGFDYVLNGLYNDSGLSGSLPH

SEQ ID NO: 158 - protein, 487 aa, Schwanniomyces occidentalis; identical to SEQ ID NO: 79

SEQ ID NO: 159 - protein, 583 aa, Rhizomucor pusillus
ATSDDWKGKAIYQLLTDRFGRADDSTSNCSNLSNYCGGTYEGITKHLDYISGMGFDAIWISPIPKNSDGGYHGYWATDFYQLNSNFGDESQLKALIQAAHERDMYVMLDVVANHAGPTSNGYSGYTFGDASLYHPKCTIDYNDQTSIEQCWVADELPDIDTENSDNVAILNDIVSGWVGNYSFDGIRIDTVKHIRKDFWTGYAEAAGVFATGEVFNGDPAYVGPYQKYLPSLINYPMYYALNDVFVSKSKGFSRISEMLGSNRNAFEDTSVLTTFVDNHDNPRFLNSQSDKALFKNALTYVLLGEGIPIVYYGSEQGFSGGADPANREVLWTTNYDTSSDLYQFIKTVNSVRMKSNKAVYMDIYVGDNAYAFKHGDALVVLNNYGSGSTNQVSFSVSGKFDSGASLMDIVSNITTTVSSDGTVTFNLKDGLPAIFTSATGGTTTTATPTGSGSVTSTSKTTATASKTSTSTSSTSCTTPTAVAVTFDLTATTTYGENIYLVGSISQLGDWETSDGIALSADKYTSSDPLWYVTVTLPAGESFEYKFIRIESDDSVEWESDPNREYTVPQACGTSTATVTDTWR

SEQ ID NO: 160 - protein, 616 aa, Aspergillus niger
AEWRTQSIYFLLTDRFGRTDNSTTATCDTGDQIYCGGSWQGIINHLDYIQGMGFTAIWISPITEQLPQDTADGEAYHGYWQQKIYDVNSNFGTADDLKSLSDALHARGMYLMVDVVPNHMGYAGNGNDVDYSVFDPFDSSSYFHPYCLITDWDNLTMVQDCWEGDTIVSLPDLNTTETAVRTIWYDWVADLVSNYSVDGLRIDSVLEVEPDFFPGYQEAAGVYCVGEVDNGNPALDCPYQKVLDGVLNYPIYWQLLYAFESSSGSISNLYNMIKSVASDCSDPTLLGNFIENHDNPRFASYTSDYSQAKNVLSYIFLSDGIPIVYAGEEQHYSGGKVPYNREATWLSGYDTSAELYTWIATTNAIRKLAISADSAYITYANDAFYTDSNTIAMRKGTSGSQVITVLSNKGSSGSSYTLTLSGSGYTSGTKLIEAYTCTSVTVDSSGDIPVPMASGLPRVLLPASVVDSSSLCGGSGRTTTTTTAATSTSKATTSSSSSSAAATTSSSCTATSTTLPITFEELVTTTYGEEVYLSGSISQLGEWDTSDAVKLSADDYTSSNPEWSVTVSLPVGTTFEYKFIKVDEGGSVTWESDPNREYTVPECGNGSGETVVDTWR

SEQ ID NO: 161 - protein, 512 aa, Bacillus stearothermophilus
APFNGTMMQYFEWYLPDDGTLWTKVANEANNLSSLGITALWLPPAYKGTSRSDVGYGVYDLYDLGEFNQKGTVRTKYGTKAQYLQAIQAAHAAGMQVYADVVFDHKGGADGTEWVDAVEVNPSDRNQEISGTYQIQAWTKFDFPGRGNTYSSFKWRWYHFDGVDWDESRKLSRIYKFRGKAWDWEVDTEFGNYDYLMYADLDMDHPEVVTELKNWGKWYVNTTNIDGFRLDAVKHIKFSFFPDWLSYVRSQTGKPLFTVGEYWSYDINKLHNYITKTDGTMSLFDAPLHNKFYTASKSGGAFDMRTLMTNTLMKDQPTLAVTFVDNHDTEPGQALQSWVDPWFKPLAYAFILTRQEGYPCVFYGDYYGIPQYNIPSLKSKIDPLLIARRDYAYGTQHDYLDHSDIIGWTREGGTEKPGSGLAALITDGPGGSKWMYVGKQHAGKVFYDLTGNRSDTVTINSDGWGEFKVNGGSVSVWVPRKTTVSTIARPITTRPWTGEFVRWTEPRLVAWP

SEQ ID NO: 162 - protein, 483 aa, Bacillus halmapalus
HHNGTNGTMMQYFEWHLPNDGNHWNRLRDDASNLRNRGITAIWIPPAWKGTSQNDVGYGAYDLYDLGEFNQKGTVRTKYGTRSQLESAIHALKNNGVQVYGDVVMNHKGGADATENVLAVEVNPNNRNQEISGDYTIEAWTKFDFPGRGNTYSDFKWRWYHFDGVDWDQSRQFQNRIYKFRGKAWDWEVDSENGNYDYLMYADVDMDHPEVVNELRRWGEWYTNTLNLDGFRIDAVKHIKYSFTRDWLTHVRNATGKEMFAVAEFWKNDLGALENYLNKTNWNHSVFDVPLHYNLYNASNSGGNYDMAKLLNGTVVQKHPMHAVTFVDNHDSQPGESLESFVQEWFKPLAYALILTREQGYPSVFYGDYYGIPTHSVPAMKAKIDPILEARQNFAYGTQHDYFDHHNIIGWTREGNTTHPNSGLATIMSDGPGGEKWMYVGQNKAGQVWHDITGNKPGTVTINADGWANFSVNGGSVSIWVKR

SEQ ID NO: 163 - protein, 478 aa, Aspergillus oryzae
ATPADWRSQSIYFLLTDRFARTDGSTTATCNTADQKYCGGTWQGIIDKLDYIQGMGFTAIWITPVTAQLPQTTAYGDAYHGYWQQDIYSLNENYGTADDLKALSSALHERGMYLMVDVVANHMGYDGAGSSVDYSVFKPFSSQDYFHPFCFIQNYEDQTQVEDCWLGDNTVSLPDLDTTKDVVKNEWYDWVGSLVSNYSIDGLRIDTVKHVQKDFWPGYNKAAGVYCIGEVLDGDPAYTCPYQNVMDGVLNYPIYYPLLNAFKSTSGSMDDLYNMINTVKSDCPDSTLLGTFVENHDNPRFASYTNDIALAKNVAAFIILNDGIPIIYAGQEQHYAGGNDPANREATWLSGYPTDSELYKLIASANAIRNYAISKDTGFVTYKNWPIYKDDTTIAMRKGTDGSQIVTILSNKGASGDSYTLSLSGAGYTAGQQLTEVIGCTTVTVGSDGNVPVPMAGGLPRVLYPTEKLAGSKICSSS

SEQ ID NO: 164 - protein, 483 aa, Bacillus amyloliquefaciens
VNGTLMQYFEWYTPNDGQHWKRLQNDAEHLSDIGITAVWIPPAYKGLSQSDNGYGPYDLYDLGEFQQKGTVRTKYGTKSELQDAIGSLHSRNVQVYGDVVLNHKAGADATEDVTAVEVNPANRNQETSEEYQIKAWTDFRFPGRGNTYSDFKWHWYHFDGADWDESRKISRIFKFRGEGKAWDWEVSSENGNYDYLMYADVDYDHPDVVAETKKWGIWYANELSLDGFRIDAAKHIKFSFLRDWVQAVRQATGKEMFTVAEYWQNNAGKLENYLNKTSFNQSVFDVPLHFNLQAASSQGGGYDMRRLLDGTVVSRHPEKAVTFVENHDTQPGQSLESTVQTWFKPLAYAFILTRESGYPQVFYGDMYGTKGTSPKEIPSLKDNIEPILKARKEYAYGPQHDYIDHPDVIGWTREGDSSAAKSGLAALITDGPGGSKRMYAGLKNAGETWYDITGNRSDTVKIGSDGWGEFHVNDGSVSIYVQK

SEQ ID NO: 165 - protein, 583 aa, Rhizomucor pusillus; identical to SEQ ID NO: 130

SEQ ID NO: 166 - protein, 623 aa, Kionochaeta ivoriensis
LSPAGWRQQSIYQVMTDRFARTDGSTIASCDTSQQAYCGGTWQGLINKLDYIQGMGFTAVWISPMVHQMAGATSDGESYHGYWAQDINTVNSAFGTAADLKALSAALHARGMYLMLDVVTNHFAYDGCGTCVDYSIFNPFNSESYFHPFCLIDYSNTTSIQVCWEGDNTVSLPDLRTEDSDVRSIWNSWISSVISTYGVDGLRVDSAQQVETSFWAGFEAAAGVYMVGEVFNGDPTYVTPFQDYMDGVLNYPAYYWITQAFESTSGSISNLANGMNTMKSLAKNTSLLGSFLENHDNPRFPSLTSDMSLAQNAIAFTMLMDGIPIIYQGQEQHFSGGGVPSDREAVWLSGYPNDTTLYAWITKLNAVRSWAIAKDSSYLAYMAYPVYTDTHTIAMRKGDTGYQVISVYTNVGASGSSYSVTLTSADTGFTASQSVVDLVGCKTYTADSTGSLSLSLTGGIPIILYPAASLTGNTICTSTGGTTTTATPTGSGSVTSTSKTTATASKTSTSTSSTSCTTPTAVAVTFDLTATTTYGENIYLVGSISQLGDWETSDGIALSADKYTSSDPLWYVTVTLPAGESFEYKFIRIESDDSVEWESDPNREYTVPQACGTSTATVTDTWR

SEQ ID NO: 167 - protein, 588 aa, Aspergillus niger
LSAAEWRTQSIYFLLTDRFGRTDNSTTATCDTGDQIYCGGSWQGIINHLDYIQGMGFTAIWISPITEQLPQDTADGEAYHGYWQQKIYDVNSNFGTADDLKSLSDALHARGMYLMVDVVPNHMGYAGNGNDVDYSVFDPFDSSSYFHPYCLITDWDNLTMVQDCWEGDTIVSLPDLNTTETAVRTIWYDWVADLVSNYSVDGLRIDSVLEVEPDFFPGYQEAAGVYCVGEVDNGNPALDCPYQKVLDGVLNYPIYWQLLYAFESSSGSISNLYNMIKSVASDCSDPTLLGNFIENHDNPRFASYTSDYSQAKNVLSYIFLSDGIPIVYAGEEQHYSGGKVPYNREATWLSGYDTSAELYTWIATTNAIRKLAISADSAYITYANDAFYTDSNTIAMRKGTSGSQVITVLSNKGSSGSSYTLTLSGSGYTSGTKLIEAYTCTSVTVDSSGDIPVPMASGLPRVLLPASVVDSSSLCGGSGRGATSPGGSSGSVEVTFDVYATTVYGQNIYITGDVSELGNWTPANGVALSSANYPTWSATIALPADTTIQYKYVNIDGSTVIWEDAISNREITTPASGTYTEKDTWDES

SEQ ID NO: 168 - protein, 588 aa, Aspergillus oryzae
ATPADWRSQSIYFLLTDRFARTDGSTTATCNTADQKYCGGTWQGIIDKLDYIQGMGFTAIWITPVTAQLPQTTAYGDAYHGYWQQDIYSLNENYGTADDLKALSSALHERGMYLMVDVVANHMGYDGPGSSVDYSVFVPFNSASYFHPFCFIQNWDNQTQVEDCWLGDNTVSLPDLDTTKDVVKNEWYDWVGSLVSNYSIDGLRIDTVKHVQKDFWPGYNKAAGVYCIGEVLDGDPAYTCPYQEVLDGVLNYPIYYPLLNAFKSTSGSMDDLYNMINTVKSDCPDSTLLGTFVENHDNPRFASYTNDIALAKNVAAFIILNDGIPIIYAGQEQHYAGGNDPANREATWLSGYPTDSELYKLIASANAIRNYAISKDTGFVTYKNWPIYKDDTTIAMRKGTDGSQIVTILSNKGASGDSYTLSLSGAGYTAGQQLTEVIGCTTVTVDSSGDVPVPMAGGLPRVLYPTEKLAGSKICSSSGRGATSPGGSSGSVEVTFDVYATTVYGQNIYITGDVSELGNWTPANGVALSSANYPTWSATIALPADTTIQYKYVNIDGSTVIWEDAISNREITTPASGTYTEKDTWDES

SEQ ID NO: 169 - protein, 583 aa, Penicillium canescens
LTPAEWRSQSIYFMLTDRFGRSDNSTTAACNVSDRTYCGGTWQGIINHLDYIQGMGFTAIWITPVTEQLPQDTGDGEAYHGYWQQNIYEIDSKLGTAADLLALSKALHARGMYLMVDVVANHMGYAGSGNSVDYSVFNPFSSSSYFHSYCLISNYDDQSNVENCWLGDTIVSLPDLDTTQTAVQTIWYDWIADLVSNYSIDGLRIDTVKHVQKSFWPGYNDAAGVYCVGEIFDGDPAYTCDYQNYMDGVLNYPIYYQLLYAFQSSSGSISDLYNMINSVKSDCADSTLLGNFIENHDNPRFASYTSDYSQAKNVISFLFLSDGIPIIYSGQEQHYSGGADPANREATWLSGYSTTAELYKYIATTNKIRKLAVSDSSYLTTKNVPFYQDSHTLAMKKGSSASPVITVLSNYGSSGSSYTLSLSGSGYSSGTKLMEMYTCTSVTVDSSGNIAVPMASGLPRVLMLASSANSLCGSSGATSPGGSSGSVEVTFDVYATTVYGQNIYITGDVSELGNWTPANGVALSSANYPTWSATIALPADTTIQYKYVNIDGSTVIWEDAISNREITTPASGTYTEKDTWDES

SEQ ID NO: 170 - protein, 583 aa, Acidomyces acidothermus
LTPAQWRGQSIYQVLTDRFGRTDDSTTAACDVNDYCGGSWQGIINHLDYIQDMGFSAIWISPVVENLVGDTQDGSAYHGYWAQNIYALNPNFGTVSDLVALSAALHQRGMYLMVDVVTNHMGYDGCGDCVDYSVFTPFNSQSYFHPFCLIDYNNSTSIKVCWEGDNIVSLPDMRTEDSDVATEWNTWISELVSNYSIDGLRIDSAQQVDNAFFPPFQAAAGGIHVLGEVFNGDPNYVCPYQDFMSGVLNYPAYYYITQAFQSTSGSISNLVNGINQMKSTCTDTTLLGSFLENHDNPRFPSYTSDLSLDKNAITFTILQDGIPIIYEGQEQHYSGGTVPNNREAIWLSGYDKSAPLYTWIASVNQIRNQAIFKDSNYLTYMAWPIYSDASTIAMRKGFDGLQIISVYSNKGASAASYTISLESSTTGFTANEALVEVMSCTTYTTDGSGNLAVTISGGLPAVFYPKAQLAGSGICGATSPGGSSGSVEVTFDVYATTVYGQNIYITGDVSELGNWTPANGVALSSANYPTWSATIALPADTTIQYKYVNIDGSTVIWEDAISNREITTPASGTYTEKDTWDES

SEQ ID NO: 171 - protein, 586 aa, Kinochaeta ivoriensis
LSPAGWRQQSIYQVMTDRFARTDGSTIASCDTSQQAYCGGTWQGLINKLDYIQGMGFTAVWISPMVHQMAGATSDGESYHGYWAQDINTVNSAFGTAADLKALSAALHARGMYLMLDVVTNHFAYDGCGTCVDYSIFNPFNSESYFHPFCLIDYSNTTSIQVCWEGDNTVSLPDLRTEDSDVRSIWNSWISSVISTYGVDGLRVDSAQQVETSFWAGFEAAAGVYMVGEVFNGDPTYVTPFQDYMDGVLNYPAYYWITQAFESTSGSISNLANGMNTMKSLAKNTSLLGSFLENHDNPRFPSLTSDMSLAQNAIAFTMLMDGIPIIYQGQEQHFSGGGVPSDREAVWLSGYPNDTTLYAWITKLNAVRSWAIAKDSSYLAYMAYPVYTDTHTIAMRKGDTGYQVISVYTNVGASGSSYSVTLTSADTGFTASQSVVDLVGCKTYTADSTGSLSLSLTGGIPIILYPAASLTGNTICTSGATSPGGSSGSVEVTFDVYATTVYGQNIYITGDVSELGNWTPANGVALSSANYPTWSATIALPADTTIQYKYVNIDGSTVIWEDAISNREITTPASGTYTEKDTWDES

SEQ ID NO: 172 - protein, 585 aa, Aspergillus terreus
LTPAEWRSQSIYFLLTDRFGRTDNSTTAACDTSDRVYCGGSWQGIINQLDYIQGMGFTAIWITPVTGQFYENTGDGTSYHGYWQQDIYDLNYNYGTAQDLKNLANALHERGMYLMVDVVANHMGYDGAGNTVDYSVFNPFSSSSYFHPYCLISNYDNQTNVEDCWLGDTTVSLPDLDTTSTAVRNIWYDWVADLVANYSIDGLRVDTVKHVEKDFWPGYNSAAGVYCVGEVYSGDPAYTCPYQNYMDGVLNYPIYYQLLYAFESSSGSISDLYNMISSVASSCKDPTLLGNFIENHDNPRFASYTSDYSQAKNVITFIFLSDGIPIVYAGQEQHYSGGSDPANREATWLSGYSTSATLYTWIATTNQIRSLAISKDAGYVQAKNNPFYSDSNTIAMRKGTTAGAQVITVLSNKGASGSSYTLSLSGTGYSAGVTLVETYTCTTVTVDSSGNLPVPMTSGLPRVFVPSSWVNGSALCNGATSPGGSSGSVEVTFDVYATTVYGQNIYITGDVSELGNWTPANGVALSSANYPTWSATIALPADTTIQYKYVNIDGSTVIWEDAISNREITTPASGTYTEKDTWDES

SEQ ID NO: 173 - protein, 565 aa, Thamnidium elegans
VPLSVLDKRNGVTTLSKRAAAADWKSRSIYQLVTDRFGRSDGSTSACGDLSNYCGGDYKGIQNQLDYIAGMGFDAIWISPIPENTDGGYHGYWAKDFEKLNTNFGSADDLKALVTAAHGKGMYVMLDVVANHAGPASGGDYSGFTFSSASNYHPQCTIDYDNQTSVEQCWVADDLPDINTEDDTIVSKLHSIVSDWVTTYDFDGIRIDTVKHIRKDFWSGYEEAAGVFATGEVFDGDAAYVGPYQDQLSSLINYPLYYAIRDVFSAGSGFSRISDMLSTIKSNFKDPSVLTTFVDNQDNARFLSVKSDMSLYKNALAFTILTEGIPVVYYGTEQGFKGGDDPKNREVLWTSNYDTSSDLYKFIKIVNNDVRQKSDKTVTLDVDVGTNTYAFTHGKNLIVVNNYGSGSTESVTVKVGDSVADGTKLVDAVSNITATVSGGSITFSLKDGLPALFVPSSGATSPGGSSGSVEVTFDVYATTVYGQNIYITGDVSELGNWTPANGVALSSANYPTWSATIALPADTTIQYKYVNIDGSTVIWEDAISNREITTPASGTYTEKDTWDES

SEQ ID NO: 174 - protein, 574 aa, Meripilus giganteus
RPTVFDAGADAHSLHARAPSGSKDVIIQMFEWNWDSVAAECTNFIGPAGYGFVQVSPPQETIQGAQWWTDYQPVSYTLTGKRGDRSQFANMITTCHAAGVGVIVDTIWNHMAGVDSGTGTAGSSFTHYNYPGIYQNQDFHHCGLEPGDDIVNYDNAVEVQTCELVNLADLATDTEYVRGRLAQYGNDLLSLGADGLRLDASKHIPVGDIANILSRLSRSVYITQEVIFGAGEPITPNQYTGNGDVQEFRYTSALKDAFLSSGISNLQDFENRGWVPGSGANVFVVNHDTERNGASLNNNSPSNTYVTATIFSLAHPYGTPTILSSYDGFTNTDAGAPNNNVGTCSTSGGANGWLCQHRWTAIAGMVGFRNNVGSAALNNWQAPQSQQIAFGRGALGFVAINNADSAWSTTFTTSLPDGSYCDVISGKASGSSCTGSSFTVSGGKLTATVPARSAIAVHTGQKGSGGGATSPGGSSGSVEVTFDVYATTVYGQNIYITGDVSELGNWTPANGVALSSANYPTWSATIALPADTTIQYKYVNIDGSTVIWEDAISNREITTPASGTYTEKDTWDES

SEQ ID NO: 175 - protein, 671 aa, Chaetomium megalocarpum
LYINGSVTAPCDSPIYCQGEILKAIELARPFSDSKTFVDMPTIKPVDEVIAAFSRLSQPLSNNSELTAFLAENFAPAGGELEEVPISELETDPSFLNKLEDVDIKEFVGKVIDIWPDLTRRYAGPGNCSQCANSFIPVNRTFVVAGGRFREPYYWDSYWILEGLLRTGGAFTQISKNMIENFLDFVETIGFVPNGARIYYLNRSQPPLLTLMVKTYVDYTNDTSILERALPLLVKEYEFWTNNRTVSITATDGKEYTLNRYSVNNNQPRPESYREDYVTANNASYYAQSGIIYPVKTPLNETEKAELYSNLASGAESGWDYTARWLKTPDDAARDVYFPLRSLNVRSIVSVDLNSILYQNEVIISEYLEQAGNSSEAKRFADAAEQRSEAMYALMWNATHWSYFDYNLTDNSQRVFVPADADTAPSDQTAAPPGQQVLFDIAQLYPFWTGAAPASLKANPLAVQNAYARVARMLDTKAGAIAATNLRTGQQWDQPNVWPPLQHILMKGLLNTPATFGTEDPAYAHTQDLALRLAQRYLDSTFCTWYATGGSTSATPQLQGAAPGATGTMFEKYADDATNVAGGGGEYEVVEGFGWTNGVLIWAADVFGDRLVRPDCGNITAAHTHSSEKRTVAGASRPDAGASGVRRERRAVELDPWDAAWTKMFGRSKLR

SEQ ID NO: 176 - protein, 662 aa, Lecanicillium psalliotae
LYQNGSVIAPCDSPIYCHGDILKEVELARPFTDSKTFVDMPAKKPLAEIQAAFDKLEKPLSNNTALNEFLSTYFEDAGGELKAVSKDKLKTDAKFVDKLNDTVIKEFVNKVIDIWPDLTREYAGSATNCTNCPNSFIPVNRTFVVAGGRFREPYYWDSYWIVEGLLRTGGAFVDITKNTIENFLDLIEQFGFIPNGARLYYLNRSQPPLLSQMVKNYISYTNDTDILKRALPILVKEHEFFMNNRSVEITVENKTYTLNRYAVSNTQPRPESFREDYNTVNNNSYYAASGIIYPVKTPLNESEQATLYANLASGAESGLDYTTAKWSTNPRDSMEDIYFPLRSLNIMNIVPVDLNSILYGNEKAISEFYNITGNSSEADSWSKKAAERQEAIQAVFWNETLYSYFDYNRTSSSQHIYIPSDDDTQSFENATAPAGMQEVFTVTQFYPFWMGAAPDYIRNNPHAVKTAYSRIAKYLELKPGGIPSSNLRSGQQWDQPSVWPPLMHVLMKGLVNTPATFGKEDPAYKDVHKLALTLGQRYLDSTFCTWYATGGSTSETPQLSGLSDSDVGIMFEKYDDTSINHAGGGGEYEVVEGFGWSNGVLMWVADTFGNELKRPDCGNITAANVHPGKRSVSAVELSSRDAQRVKKFGRRAEGRMKVPGVL

SEQ ID NO: 177 - protein, 637 aa, Doratomyces sp.
LYTNGSIIAPCDSPIYCHGDILHQVQLAHPFPDSKTFVDMPAIKSVDEIQAAFDKLDKPLKNDTALQNFLAENFAEAGHELAEVDPSELSTDPRFLDKVSDTVIHEFTQKVIDIWPDLTRSYSPSGAGSDCPDCPNSFLPVNRTFVVAGGRFREPYYWDSYWIVEGLLRTGGDFLGVSRNIIENFLDFVDDFGFVPNGARRYYLNRSQPPLLSLMVKSYVEQTNDTEILDRAVPLLIKEYEFWTKNRTVEVPFGNETITLNQYNVDNTQPRPESYREDYITATNASYYSASGEVYEEVEKLNETQRATVYRNLATGAESGWDYTSRWMARPRDAVEDVYFPLRSLNIIEIVPVDLNSILYANELAIAEFVRLAGADDCEEEAAAWEALAEKRSADMHRLMWNDTLHSYFDYNLTSSSQNVYVPADNDTAPFERPGGTPEGSQVFFSAAQFYPFWTGAAPSSLRDDPAAVQLAYSRVASYLDLRAGGIPATNLRTGQQWDQPSVWPPLMHILTSGLLNTSPASASDDDDPSYAPTRDLALSLAQRYLDSTFCTWYATGGSTSETPQLDGFTDEDKGAMFEKYDDSATNVAGGGGEYEVVEGFGWTNGVLIWMVDTFGDELSRPDCGDIEAANAHPARK

SEQ ID NO: 178 - protein, 601 aa, Mucor moelleri
IQNHTSFSCDSPIYCEGDILHTVQLAKIFSDSKTFVDMPTSKSESQVIEAFKAIGGRNATIAQVQQFLNENFLTAGTEVKRLTNITIPELNWIDNITDPDYRGWISKLNQAWSNLTFTFDTSVLCQDCATSTLPVSRPFVVPGGRFREFYYWDSFFVIKGLLLSDQVELAKNMILNFFDFIDTYGFIPNGARIYYLNRSQPPFLTQMVEAFWEKTSDKEFMTNALPFLDKEYNFWMTNNSISVPDPKNPSKKYKMNHYVTLNTSPRPESYVEDYNTVNNGTDYSQAVKLQLYADIAAGAETGWDYSSRWTRQKHPAPNQTEGYEMLRSINTANIVPIDLNSLLWNTETMLAEWHDRFGEKSKSKKKSAYYQTQAKKRLDAMEKLMWNPTDYTYYDYNLTSSSQNLEFTPANLFPIWLGALPNKVMKNKTELARVFDETENALRKYPGILTTSYYNTTMQWDWPNGWPPLSYVAMEGMNKVEESLNGKKGSKQDGKTYTTSRGTSLARLSFTLAERYAASAYCGWYKTGGSIPGILNKIDGVADDGHMFEKFDVNTIGISGSQGEYVSQTGFGWTNGIALWIFDTYANLTAPDCNQTITLNI

SEQ ID NO: 179 - protein, 650 aa, Phialophora cyclaminis
LYINGSVIAPCDSPIYCHGELLKAIELARPFSDSKTFVDMPTRKPVDEVVAAFEKLSKPVVNDTKLGEFLQANFLPAGGDLSDFPPGSLETDPKFLDNINDTVIREFTEAVIDIWPDLTRRYVGASNCTGCANSFIPVNRTFVVAGGRFREPYYWDSYWIIEGLLRTGGNFVQISKNIIENFLDFVETIGFVPNGARIYYLNRSQPPLLTAMVKAYLEHTNDTKILDRAVPLLIKEYNFWITNRSVTLTGPDGNEYTLQRYSVNNNQPRPESYREDYNTANNKSYYSTSGIIYPENVSLNDSEKKELYANLATGAESGWDYGTRWLSRPADALRDVYFPLRYVKTRDLVPVDLNAILYQNEASISSFLYIQGNDTGAAHFAKLAAARQKAMTAVLWNATLFSYFDYNMTSSSHFSFIPVDDDATSIETATAPRGFQQIFHVAQLYPFWTGAAPASLRENPLAVQRAFSRVSQMLEEKAGSIPATNFYTGQQWDEPNVWPPLQHIIMEGLRNTPATFGEDDPIYQGVQDLALRVAQRYLDSTFCTWYATGGSTSLTPKLAGLTDNAKGIMFEKYGDNSTNVAGGGGEYEVVEGFGWTNGVLIWAVDTFGNKLKRPDCGDIQPAHVEARGLQRRAVELDKWDAQWVKRFGAK

SEQ ID NO: 180 - protein, 654 aa, Thielavia arenaria
LYINGSVIAPCDSPLYCHGDILKAIELARPFQDSKTFVDMPTIRPVEEVIAAFNRLSQPLSNNSELNAFLQANFAPAGGELEEVPESELSTNPVFLDKLNDTVIKEFVAKVIDIWPDLTRRYAGPGNCSECADSFIPVNRTFVIAGGRFREPYYWDSFWILEGLLRTGGAFTEISKNMIENFLDFVETIGHIPNGARIYYLNRSQPPLLAGMVKNYVDYTNDTSILERALPLLIKEYEFWTNNRTVQVTASDGKTYTLHRYNVNNNQPRPESYREDWITANNASYYAASGIIYPVKTPLNESEKAALYSNLASGAESGWDYGTRFLMRPEDAARDIYFPLRHLNVRDMVTVDLNAILYQNEVIISEYLEQAGNNTEAERFASAARQRSEAMYALMWNETLWSYFDYNLTSNSQYTFIPADVNATAAEKANAPEGQKVIFHIAQLYPFWTGAAPDQLKNNPLAVQKAYSRVAEMLDIKPGAIPATNFITGQQWDQPNVWPPLMHVLMAGLLNTPPTFGEDDPAYQAVQALALRLGQRYLDSTFCTWYATGGETSQTPRLQGVSPDATGTMFEKYADNAINVAGGGGEYEVVEGFGWTNGVLIWAADVFANGLKRPDCGNITAAHTHNGAKRAVELHPRDAAWTKKFGKRALKKRA

SEQ ID NO: 181 - protein, 661 aa, Thielavia antarctica
LYVNGSVTAPCDSPLYCQGEILKAIELARPFADSKTFVDMPTLRPLDDVIAAFRKLSQPLSNSSELNAFLAANFAPAGGELEEVPKSELRTKPAFLDKVEDVVIKEFVGKVIDIWPDLTRRYAGPGNCTECANSFIPVNRTFVVAGGRFREPYYWDSYWILEGLLRTGGDFTKISRNIIENFLDFVDTIGFVPNGARIYYLNRSQPPVLTLMVKTYVDYTNDTSILERALPLLIKEHEFWTTNRSVSVEVDGKTHTLNRYFVNNNQPRPESYREDWITANNASYYAASGIIYPVKTPLNGTQQAELYANLASGAESGWDYTSRWLKTPSDAARDVYFPLRSLNVINTIPVDLNSILYQNEVIISEYLEQAGNKSGAEKFSDAARQRSEAMYALMWNATNWSYFDYNLTSSGQNTHFPADADATAAETTSSPAGTQLLFSVSQLYPFWTGAAPQQLKSNPLAVTQAYARVAAMLDAKAGAIPATNLLTGQQWDEPNVWPPLQHVLMQGLLNTPATFGADDPAYQATQALALRLAQRYLDSTFCTWYATGGSTSATPRLAGVSAGAEGSMFEKYGDDSTNVAGGGGEYEVVEGFGWTNGVLIWAADVFAGKLQRPECGDIEAAQTHGGAARRGLGMERRAIELDPWDARWTKAFGKRALRRRA

SEQ ID NO: 182 - protein, 667 aa, Chaetomium sp.
LYINGSVTAPCDSPLYCQGEILKAIELARPFSDSKTFVDMPTIKPVDDVIAAFSRLSQPLSNNSELNAFLAENFAPAGGELEEVPESELETDPAFLDKLEDTTIKEFVTKVIDIWPDLTRRYAGPGNCSKCANSFIPVNRTFVVAGGRFREPYYWDSYWILEGLLRTGGAFTEISKNIIENFLDFVDTIGFIPNGARIYYLNRSQPPLLTLMVKTYVDYTNDTSILERALPLLIKEHEFWTNNRSVAITAADGKKYTLQRYYVNNNQPRPESFREDYITANNASYYAASGIIYPVKTPLNETEKAELYSNLASGAEAGWDYTARWLKTPNDAARDVYFPLRSLNVIGMVPVDLNSILYQNEVIIAEYLQQAGNSSEARRFATAAEKRSEAMYALMWNSTHWSYFDYNLTSNSQRIFVPTDADADPVDQTNAPPGHQVLFDIAQLYPFWTGAAPASLKNNPLAVQLAYARVAHMLDTKAGAIPGTNFRTGQQWDQPNVWPPLQHVLMKGLLNTPPTFGEADPAYQEVQRLALRLAQRYLDSTFCTWYATGGSTSDMPQLQGVNPGATGTMFEKYADNATNVAGGGGEYEVVEGFGWTNGVLIWAADVFGEGLTRPDCGNITAAHTHSGAKRGLDGGEGGAGGLWGRRAVELDPWDARWTKMFGRRKRE

SEQ ID NO: 183 - protein, 671 aa, Chaetomium nigricolor
LYINGSVTAPCDSPLYCQGEILRAIELARPFSDSKTFVDMPTIKPLEEVIAAFNQLTQPLSNNSELNTFLAENFAPAGGELEEVPKDELNTDPGFLDKLNDTTIREFVAKVIDIWPDLTRRYAGGGNCSECANSFIPVNRTFVVAGGRFREPYYWDSYWILEGLLRTGGAFIEISKNIIENFLDFVETIGFIPNGARIYYLNRSQPPLLTLMVKTYVDYTNDTSILERALPLLIKEHEFWVNNRSVEITAANGQTYTLNRYHVNNNQPRPESYREDYITANNGSYYAASGIIYPVRTPLNETEKAELYANLASGAESGWDYTARWLKTPNDAANDVYFPLRSLNVRGLVPVDLNSILYQNEVIIAEYLQQAGNLSLAQRFAEAAEQRSEAMYALMWNATYWSYFDYNLTSNSQRIFVPLDADSRTIETVGAPPGHQVLFDIAQLYPFWTGAAPANLKNNPLAVQQAYSRVASMLDAKAGAIPATNFRTGQQWDQPNVWPPLQHILMQGLLNTPPTFGDSDPAYQHVRDLALRLAQRYLDSTFCTWYATGGSTSDMPQLQGVSPDATGTMFEKYADNATNVAGGGGEYEVVEGFGWTNGVLIWAADVFGDALKRPDCGDIEAAHTHQAKKRDVEGLERRAVELDPWDAAWTKMFGRSKLRKRGAGGQKRWVS

SEQ ID NO: 184 - protein, 666 aa, Chaetomium jodhpurense
LYFNGSVIAPCDSPLYCQGEILKAIELARPFSDSKTFVDMPTIKPVDEVIAAFNRLSQPLTNNSELNAFLAENFAPAGGELEEVPKDELNTDPKFLDKLEDATIKEFVAKVIDIWPDLTRRYAGASNCSECANSFIPVNRTFVIAGGRFREPYYWDSYWILEGLLRTGGAYTQISRNMLENFLDFVETIGFIPNGARIYYLNRSQPPLLAMMIKNYVDYTNDTSILDRALPLLIKEHEFWINNRSVSITAADGKQYTLHRYNVNNNQPRPESYREDYITANNASYYAASGIIYPVKTPLNESEKAELYANLATGAESGWDYTARWLKTPNDAAKDVYFPLRSLNVRGMVSVDLNSILYQNEVIIAEYLERAGNISEAERFAAMAQQRSEAMYALMWNSTHWSYFDYNLTSNSQRIFVPLDDDSSTAEQANSPPGHQVLFDIAQLYPFWTGAAPESLKSNPLAVQLAYSRVARMLDTKAGAIPATNFRTGQQWDQPNVWPPLQHVLMAGLLNTPPTFGESDPAYQNVRALALRLAQRYLDSTFCTWYATGGETSQTPRLQGVSPDATGTMFEKYADNATNVAGGGGEYEVVEGFGWTNGVLIWAADVFADGLKKPDCGNITAAHTHSAKRGLERRAVELDPWDAAWTKMFGRSKLRKREEGRKRWLS

SEQ ID NO: 185 - protein, 670 aa, Chaetomium piluliferum
LYINGSVIAPCDSPLYCHGEILKAIELARPFSDSKTFVDMPTIKPLDEVIAAFSQLSQPLSNNSELNAFLAENFAPAGGELEEVSKDELQTDPTFLDKLDDTTIKEFVSKVIDIWPELTRRYVGSSDCSGCANSFIPINRTFVVAGGRFREPYYWDSYWILEGLLRTGGAFVDISRNIIENFLDFVETIGFVPNGARIYYLNRSQPPLLTLMVKTYVDYTNDTSILERALPLLVKEHEFWTTNRSVSITANGKEYTLNRYSVNNNQPRPESYREDYITASNESYYAESGIIYPVRTPLNETEKAELYSNLASGAESGWDYTSRWLKTPNDAANDVYFPLRSLNVLGLVPVDLNSILYQNEVILAEYFEQAGNSSEAERFAAAAEQRSEAMYDLMWNATHWSYFDYNLTSSSQRIFVPLDDGASTQEQSTSPPGYQVLFDVAQLYPFWTGAAPAALKSNPLAVQHAYSRVADMLNTKAGAIPATNFRTGQQWDQPNVWPPLQHIIMQGLLNTPPTFGESDPAYENTQSLALRLAQRYLDSTFCTWYATGGSTSDMPPLQGVSAGATGTMFEKYADDATNVAGGGGEYEVVEGFGWTNGVLIWAADVFGDALKRPDCGNITAASTHEGATKRDLRGLGRRAVELDPWDAAWTKMFGRAKLRKREQGRETWVN

SEQ ID NO: 186 - protein, 674 aa, Myceliophthora hinnulea
LYINGSVTAPCDSPIYCHGELLKGVELAHPFVDSKTFVDMPTLKPVDEVLAAFSKLRQPLSNNSELNNFLAEYFAPAGHELEEVPDSELQTDPKFLDKLEDRTIKEFVSKVIDIWPDLTRRYAGPGDCSDCANSFIPVNRTFVVAGGRFREPYYWDSYWILEGLLRTGGAFTQISKNIIENFLDFIDTIGFIPNGARIYYLNRSQPPLLTRMVKSYVDYTNDTSILERALPLLIKEHDFFTNNRSVSVTASNGKTYTLHRYHVENNQPRPESYREDYITANNGSYYAASGIIYPVKTPLNETEKAVLYSNLASGAESGWDYTARWLRVPDDAARDVYFPLRSLNVREIVPVDLNSILYENEVIIAGYLEKAGNSSEAKRFASAAKQRSEAMYNLMWNATHWSYFDYNLTSNAQNIFIPADEDTAPFDRTAAPPGKQVLFHIAQLYPFWTGAAPAHLKSNPLAVQKAYARVSRMLDSKKGAIAATNYRTGQQWDQPNVWPPLQHVLMQGLLNTPATFGESDPAYQGVQKLALRLAQRYLDSTFCTWYATGGSTSDFPQLQGVSPDATGIMFEKYADSAINVAGSGGEYEVVEGFGWTNGVLIWAADVFGNKLKRPDCGNITAAHTHSEAKRSLGDGGLARRAVELDPWDAAWTKMFGRSKLRRREAEDVRKRWSS

SEQ ID NO: 187 - protein, 659 aa, Chloridium virescens
LYINGSVIAPCDSPLYCQGDILKAIQLAQPFSDSKTFVDMPTTQPVDQVIAAFNQLPQPVSNNSGLQNFLSTYFAPAGGELTEVPKDQLQTNPMFLNKLNDTVIREFVTAVIDIWPDLTRTYTGASNCTGCSDSFIPVNRTFVVAGGRFREPYYWDSFWILQGLLRTGGAFTQISKNIIENFLDLVDQFGFVPNGARVYYLNRSQPPVLSEMVRTYVAYTNDTSILARAIPTLIKEHNFWMQNRTVNITGADGNTYTLNQYHVENTQPRPESYTEDYITANNHSYYATSGIIYPETKPLNDSEIANLYANLASGAESGWDYGSRYLARPNDAAQDVYFPLRSLNVLNIVPLDLNSLLYQSEQNIALFLQATGNSSEAEQWTSLAAQRQTAIHALMWNETLWSYFDYNLTSNGQNIYVPADKDATPADTASAPPGYQVLFDVAQFYPFWTGAATDELRRNPLAVRQAFTRVDAYLTAKAGGIPATNLMTGQQWDQPNVWPPLMHVLMQSLLDTPATFGAADPSYAALQGLALRLAQRYLDMTFCTWYATGGSTSQTPKLQGLGPDAVGTMFEKYADNATNIAGSGGEYTVVEGFGWTNGVLIWAADTFGAQLTRPNCGNITAAHVTPGKRSVGLGRRAVELHESDARWVKMFGSRAWRNA

SEQ ID NO: 188 - protein, 662 aa, Gelasinospora cratophora
LYVNGSVTAPCDSPIYCYGELLHQVELARPFSDSKTFVDMPTIKPVDEVLEAFSKLTLPLSNNSELHEFLNTYFGPAGGELEAVPTDQLHVSPTFLDNVSDDVVKQFVNSVINIWPDLTRKYVGAGEICTGCANSFIPVNRTFVVAGGRFREPYYWDSFWILEGLLRTGGAFTEISKNTIENFLDLVEQIGFVPNGARLYYLNRSQPPLLTQMVRIYVEHTNDTSILERAVPILKKEWEWWITNRTVEVTADGKTYSLQRYHVDNNQPRPESYSEDYITANNNSYYATSGIIYPETTPLNDTQKAQLYANLASGAESGWDYSTRWLKNPNDAARDVYFPLRSLNVLEIVPVDLNSILYQNEVTIGKFLAQQGNKDEAEEWAKKAEQRSEAMYKLMWNSTLWSYFDYNLTSSSQNIYVPADPQVFPFEKPSGTPEGYQVLFSINQMFPFWTGAAPDQLKANPLAVKLTFDRVKNYLDNKAGGIPATNFVTGQQWDEPNVWPPLMHVLMDGLLNTPATFGEDDPAYQETQNLALRLAQRYVDSTFCTWWATGGSTSETPKLQGLGSDAKGIMFEKYADNSTNVAGGGGEYEVVEGFGWTNGVLIWAADKFGDKLKRPNCGDLTPANVGKRAVELDAFDAKFTKKFARKGKLEKLKAKFKRRAAI

SEQ ID NO: 189 - protein, 543 aa, Acidobacteriaceae bacterium
QTTTTSAGLHDTLAYIKRTWHTLERSNKTLLKSADDVKVGQAGTLTLYVSQDVKPQAVNASLRRELPPADKKRIVVRQLPEHPEAVEPAGLLYLPYPYVVPGGRFNEMYGWDSYFILLGLVHDDELALAKNMTDNFIYEIEHYGMILNANRTYYLTRSQPPFLTQMILEVYRRTGDGKWLASTLPAIEKYYAYWMREPHLTPETGLSRYWGGADTPAPEVVHGEKDAAGHNQYDRVREYYRTHNVTAYDVSQYYDKATDRLKPLFYIADRAMRESGFDPSSRYGPFSADIIHYDPVCLNSLLYRMESDTATILKQLNRTSEARVWEKRATQRAELVNRLMWNEEKGLYFDYDFITRRQSNYHFVTTFYPLWAGIASRQQADRVRKNLSIFERAGGLQTSDYISGSQWDAPFGWAPLQIMTVEGLRRYGFNEDADRISRKFINMVVRDFEEHGTIKEKYDVVIGKSDLAAGLKFGYTSNEAGFGWTNAAVVLFIEELAGERPLAASLDRESMPMLRQRHLSPQPSVWPPFSPQAPQYRRRDPYR

SEQ ID NO: 190 - protein, 532 aa, Acidobacterium capsulatum
GARSSLSPHAVAGPQPIDAYIHTAWSTLTRSMSDCKSVADPKLKSTPVLYLPRDLAVPANVAAMQKQCHVRVLRLPIVITHFDQIRESQIATPGLLYLPHPYVVPGGRFNEMYGWDSFFILKGLLDDHHIALARGIVENFFFEIAHYGGILNANRTYYFTRSQPPFLSSMIRAIYAAEVAEGHTQAAHAWLVEAYPYAVRDHALWMSPIHQAGNTGLARYFDTGQGPVPEMADDSTYYQDVIRWLLAHPGLHTGYLMHGSPHLDAAARERLAQLSCDPTLSKVCARAHVHGYWLTRSFYKGDRAMRESGFDTTFRFGPFSGSTQHFAPVGLNALLYKYERDLAWMAAQLGKPGEAAKWNSEAETRRAEMNHYLWNAQKKMYFDYNFETHRQSSYAFITTFYPLWAGAADKAQQQGVIASLPLFEHPGGLAISNHDSGVQWDLPYGWAPTEWMAVQGLLRADDQHDARRIASEFNRTVRTTYQHDHAIYEKYDVVNRSNDFRVTAGYTQNVVGFGWTNAVYLEFQSLLAHPGQ

SEQ ID NO: 191 - protein, 568 aa, Acidovorax wautersii
AAAVSSGLRISERHPAYSTNPARVQVPGAPGAPPSDHCTPADRYQELFVAVQSQQIFEDSKTFVDCGPIGEPEDILAAYRAEHAQPDFDLARFVAQHFTAPQVAANDYVGAPGMALAEHIDALWPVLTRKPEDHPVRGSALPLAHPYVVPGGRFAELYYWDSYFTMLGLAATGRSELVQCMTDNFARLIDAFGFVPNGTRTYYLSRSQPPLFAAMAELGALVGGPPVSHYLPQLLQEHAWWMDGLHVLHPGEARRRVVALPGGEILNRYWDDRDTPREESWREDIETASAVDRPSADVYRDLRAAAESGWDFSTRWLRAPDAANPASLHLSQICTTDLLPVDLNAFLYRMEVSIAKASQSAGDRATATHFHDLAAHRREAVNRLMWNEAEGAYFDYDWRRGELRGCLTAATVVPLYAGMATEAQAAAVARAVRTHLLAAGGLATTVCSSDQQWDRPNGWAPLQWMAVRGLERYGHKDLALEVRQRWIETVRSVYQREGKLVEKYAVGNGDGAPLCGGGGGEYPLQDGFGWTNGVVQCWLDPRYDTYAAAQTVYYGPTDDGTADSLPEA

SEQ ID NO: 192 - protein, 529 aa, Xanthomonas arboricola
APMDTPVVNAPAATPPTPDLAYPELFQAVQSGELFDDQKHFVDFLPLRDPALINADYLAQHDHPGFDLRKFVDANFEESPPVQTDAIRQDTALREHIDELWPKLVRSQTHVPPYSSLLALPHPYVVPGGRFREVYYWDSYFTMLGLVKSGETTLSRQMLDNFAYLIDTYGHIPNGNRSYYLSRSQPPFFSYMVELQAGVEGEAVYQRYLPQLRKEYAYWMQGSEDLQPGQAARHVVRLADGSLLNRYWDERDTPRPEAWLHDTRTAAEAGDRPAAEVYRDLRAGAESGWDYTSRWLADGQNLRTIRTTAIVPIDLNSLLYHLERTLAQACAQPGAECAQDYAALALRRKQAIDAHLWNAAGYYADYDWQTRKLSDQVTAAALYPLFTGLATDAHAKRTASTVRARLLRPGGLATTAVKTGQQWDEPNGWAPLQWVAVDGLRRYGEDALARTIGERFLTQVQALFAREHKLVEKYGLEADAAGGGGGEYALQDGFGWTNGVTLMLLNLYPDTATKPAPAKRARKPEAAAR

SEQ ID NO: 193 - protein, 540 aa, Kosakonia sacchari
AEAQNTPQPPDILLGPLFSDVQTAKLFPDQKTFADAVPKGDPLMILADYRMQRMQTSFDLRHFVDVNFTLPKEGEKYVPPEGQNLREHIDGLWPVLTRTTDSAGKWDSLLPLPKPYVVPGGRFREVYYWDSYFTMLGLAESGHWDKIEDMVTNFAHEIDTWGHIPNGNRSYYLSRSQPPFFSLMVELLATHDGDEALKTWLPQMEKEYQYWMEGADTLQPGQANKRVVKLSDGSVLNRYWDDRDTPRPESWLDDVTTAKNNPNRPATEIYRDLRSAAASGWDFSSRWMDDPNQLGTIRTTSIVPVDLNALMFKMEKMLARGYQAAGDSAKASQYDALANARQKGIEANLWNEKEGWYADYDLKTKKVRNQLTAAALYPLFVNAAAKDRADKVASAAKERLLKPGGIATTTVNSGQQWDAPNGWAPLQWVATAGLQNYDQQKLAMEVSWRFLTNVQHTYDREKKLVEKYDVSTTGTGGGGGEYPLQDGFGWTNGVTLKMLDQICPKEKPCDSVPQTQPAQQPAAKVEPTSQPSKQQQAVAQ

SEQ ID NO: 194 - protein, 532 aa, Enterobacter sp.
DEQPAFQKNSPDILLGPLFNDVQSAKLFPDQKTFADAVPKSDPLMILADYRMQHTQSSFDLRHFVEMNFTLPAEGEKYVPPAGQSLREHIDDLWPVLTRTTDKASNKWDSLLPLPKPYVVPGGRFREVYYWDSYFTMLGLAESGHWDKISDMVDNFAWEIDTFGHIPNGNRSYYLSRSQPPFFSMMVELLATHDSDALKKYRPQMEKEYAYWMEGVDSLQPGQANQRVVKLDDGSVLNRYWDDRDTPRPESWLDDVNTAKNNPNRPATEIYRDLRSAAASGWDFSSRWMDDPQKLGTIRTTSIVPVDLNALMFKMEKLLARASQEAGDSAAASKYEALATARQKAIENHLWNDKEGWYADYDLKSKKVRNQLTAAALFPLYVKAASQERADKVAAATSARLLKPGGITTTTINSGQQWDAPNGWAPLQWVATEGLQNYGQNKVAMDVTWRFLKNVQHTYDREKKLVEKYDVSTTGTGGGGGEYPLQDGFGWSNGVTLKMLDLVCPKEKPCDSVPENQPAANDEAAPVKASAQ

SEQ ID NO: 195 - protein, 720 aa, Saitozyma flava
QNPASSSSFSPTPVTTMVPSPTAALNATVPGQGVYPPLQAWCNNGGNDTFCPGVLLQDVQLSGIFPDSKTFVDKPTRGTLNETLRTFASLGNNLTVGQIEGFVNNSFKGEGLELSQVALEGFNPNPAFLDTISDPIYQGWMSVVNSYWTLLIRETNRSALCNGDCESSLIPLNNTIVVPGGRYREIYYWDSYWILIGLLESELTAYATDLISNFMDFIQTYGFIPNGGRKYYLNRSQPPVFTQMLNTYVQRTGNTSILARGLPLAHQELVWWENNRVISVTSPYSNITRRVAHFAVNNTAPRPEGYVEDYETAFGASPALNETARGQLYSDLAAGAESGWDYSSRWCKQPVINLTDNFPALRTINTAKIIPVDLNSLLAGDHTLLANLYELYGNSSNANTSVTSNSSQLVPYHRQLAKNYSDAVLDLHWDAQKAWFYDFNLTANARADIYHPGGTFALWQNITPPAVASNETYALEVVSGARFLLGKYTSIPSVSTLIETGLNWDFPNSWPPHVYSSIKAFETLGRAFPNASVLSNISIPFSDVQKNQLGLDESAIPAQPASTIGNSTSQIAEAQGKPWPQALSIEYANRYMQAAFCSWYSTGGSIDGLLTQLPLSELNMTGTFQAGTTGVMFEKFNVTDLDAAGGGGEYKVQIGFGWTNGVALWLGANFGQYLPQPTCPLIPIIEVQNGMNSSVYQNGTMTNSTKTQSYIFQGHRIPRK

SEQ ID NO: 196 - protein, 723 aa, Phaeotremella skinneri
QTPTSSSSSSFSATPVSTSVPSPTVPLNSSVIGQGLYPPAQAWCNGGMNDTFCPGVLLQDVELSGIFADSKTFPDKPTVGTLNSTLQAFAALPANVTVGEIETFVNQYFKGEGLELEQVAIEGFVANPAILNNITDPVFKGWVSTVNGYWQLLIRQTNESSLCNETSCASSLIPLNHTIVVPGGRYREIYYWDSFWILQGLLKSELYTYSWDLLQNFMDLIETYGFLPNGGRKYYLNRSQPPVFIQMLDAYIKVTGNSSILARALPIATTELAWWSSNRTIPVTSPYTGITHLVAHYAVTNSAPRPEGYVEDFTTAMGASPALNDSARAELYSELASGAETGWDYSSRWCRQPLLNLTDNNPALRTLNVKAIIPVDLNSLLAGDHALLANLYDLYSNSSSSNSTSNSSSISNSSSQAAYHRQAAQNLTAAILDLHWSPSKSFFYDFNTSSNSQSDIYTPASLFPLWQNITPPALVGNETAALQLVSGVRYLLGKYAGIPSVATLLATGLNWDFPNSWPPHVYTSIKAFQTLYRVNPNATVLSNLTLSFAQVQAGQLGLSETGFQIQPASTVGNTSLETAEAKGKPWPVALGIEYANRYMQSAFCSWYSTGGEISGVLTQLPLSDLNSTGTFTAGQTGVMFEKFNVTDPDAAGGGGEYTVQTGFGWTNGVVLWVAGEFGSLLPAPTCPLIPIIEISGSSNSSIYANGTVTNSTALYRGYKIPRK

SEQ ID NO: 197 - protein, 663 aa, Trichoderma asperellum
LYTNGSVIAPCDSPIYCHGDILQDIQLAHPFSDSKTFVDMPAKRPLREIQSAFNNLSKPLTNDSSLQVFLETYFADAGGELVEVPRSSLTTNPAFLNKINDTVIREFVTKVIDIWPDLTRRYSGAVGNCSTCPNSFIPVNRTFVVAGGRFREPYYWDSYWIIEGLLRTGGAFVGIAKNTIENFLDFIDRFGFIPNGARLYYLNRSQPPLLSQMVRIYIEHTNDTSILKRALPLLVKEHDFWIRNRTISVNIANKTYTLQQYAVQNTQPRPESFLEDYVTANNRSYYATSGIIYPENKHLNSTEMADLYANLATGAESGNDYTSRWLANPSDAINDVYFPLRSLNNKEIVPVDLNSILYGNELTISQFYNRTGDATAARAWAERAANRSAAIQAVFWNETLFSYFDYNLTSSSQYVYVPADKDTISLDRQTAPSGKQVFFHVGQFYPFWTGAAPDYVKNNPYAVTRAYDRVTGYLDAQPGGIPASNVQTGQQWDQPNVWPPHMHILMQGLNNVPATFTAQDPSYQDIQNLSLRLGQRYLDFTFCTWLATGGSTSETPKLHGLSDQDVGIMFEKYDDNSTNAAGGGGEYEVVEGFGWTNGVLLWTADTFGNKLKRPQCGNITAGHPAPASSSSKRSAVQLDAWDARRVKKFGKRTEGRVKRPFLF

SEQ ID NO: 198 - protein, 674 aa, Corynascus sepedonium
LYINGSVTAPCDSPIYCQGELLKAVELARPFVDSKTFVDMPTIKPVDEVLAAFSKLSLPLSNNSELNAFLYENFAQAGHELEEVPDSELETDAKFLDKLEDRTIKEFVGKVIDIWPDLTRRYAGPSNCTECANSFIPVNRTFVVAGGRFREGYYWDSYWIVEGLLRTGGAFTHISKNIIENFLDFVDTIGFIPNGARIYYLNRSQPPLLTLMVKSYVDYTNDTSILDRALPLLIKEHEFFMNNRTVSITGSNGKEYTLNRYHVENNQPRPESFREDYITANNGSYYASSGIIYPVKTPLNETEKAALYSNLATGAESGWDYTSRWLGVPSDAARDVYFPLRSLNVRDIVPVDLNSILYQNEVIIAEYLEKAGNSSAAKRFATAAEQRSEAMYSLMWNATHWSYFDYNLTDNTQHIFVPADEDTAPQDRIEAPPGQQVFFHIAQLYPFWTGAAPASLKANPLAVQQAYARVARMLDIKKGAIPATNYRTGQQWDQPNVWPPLQHILMKGLLNTPATFGKSDPAYQSVQNLALRLAQRYLDSTFCTWYATGGSTSDFPQLEGVTPGATGVMFEKYADNATNVAGTGGEYEVVEGFGWTNGVLIWAADVFGNKLKRPDCGNITAAHTHSSAKRGLEENKLPRRAVELDPWDAAWTKMFGRSKLRRREAEDVRKRWMS

SEQ ID NO: 199 - protein, 674 aa, Myceliophthora thermophila
LYINGSVTAPCDSPIYCHGELLKGVELAHPFVDSKTFVDMPTLKPVDEVLAAFSKLRQPLSNNSELNNFLAEYFAPAGHELEEVPKGELQIDPKFLNKLEDRTIKEFVSKVIDIWPDLTRRYAGPGDCSGCANSFIPVNRTFVVAGGRFREPYYWDSYWILEGLLRTGGAFTQISKNIIENFLDFIDTIGFIPNGARIYYLNRSQPPLLTRMVKSYVDYTNDTSILERALPLLIKEHDFFTNNRSVSVTASNGKTYTLHRYHVENNQPRPESYREDYITANNGSYYAASGIIYPVKTPLNETEKAVLYSNLASGAESGWDYTARWLRVPDDAARDVYFPLRSLNVREMVPVDLNSILYENEVIIAEYLEKAGNSSEAKRFASAAKQRSEAMYNLMWNATHWSYFDYNLTSNAQNIFVPADEDTASFDRYAAPPGQQVLFHVAQLYPFWTGAAPAHLKSNPLAVQKAYARVSRRLDTKKGAIAATNYRTGQQWDQPNVWPPLQHVLMQGLLNTPATFGESDPAYQGVQKLALRLAQRYLDSTFCTWYATGGSTSDFPQLQGVSPDATGIMFEKYADSATNVAGGGGEYEVVEGFGWTNGVLIWAADVFGNKLKRPDCGNITAAHTHSEAKRSLGDGGLARRAVELDPWDAAWTKMFGRSKLRRREAEDVRKRWSS

SEQ ID NO: 200 - protein, 661 aa, reesei GH37
LYINGSVIAPCDSPIYCHGDILREIELAHPFSDSKTFVDMPAKRPLSEIQTAFANLPKPLRNDSSLQTFLASYFADAGGELIQVPRANLTTNPTFLSKINDTVIEQFVTQVIDIWPDLTRRYAGDAAVKNCSSCPNSFIPVNRTFVVAGGRFREPYYWDSYWIVEGLLRTGGAFVGIARNTIDNFLDFIERFGFVPNGARLYYLNRSQPPLLSRMVKVYIDHTNDTAILRRALPLLVKEHEFWTRNRTVDVRVNNKTYVLNQYAVQNTQPRPESFREDFQTANNRSYYAASGIIYPATKPLNESQIEELYANLASGAESGNDYTARWLADPSDAMRDVYFPLRSLNNKDIVPVDLNSILYGNELAIAQFYNQTGNTTAAREWSSLAANRSASIQAVFWNETLFSYFDYNLTSSSQNIYVPLDKDAVALDRQTAPPGKQVLFHVGQFYPFWTGAAPEYLRNNPFAVTRIFDRVKSYLDTRPGGIPASNVNTGQQWDQPNVWPPHMHILMESLNSVPATFSEADPAYQDVRNLSLRLGQRYLDFTFCTWRATGGSTSETPKLQGLTDQDVGIMFEKYNDNSTNAAGGGGEYQVVEGFGWTNGVLLWTADTFGSQLKRPQCGNIMAGHPAPSKRSAVQLDMWDASRVKKFGRRAEGRMGTLHAW

SEQ ID NO: 201 - protein, 670 aa, Chaetomium virescens
LYINGSVTAPCDSPLYCQGEILKAIELARPFSDSKTFVDMPTIKPLEEVIAAFGRLKQPLSNNSELTAFLAENFAPAGGELEEVPKSELHTDPVFLNKLDDAVVKEFVGKVIDIWPDLTRRYAGPGNCSNCENSFIPVNRTFVVAGGRFREPYYWDSYWIVEGLLRTGGAFVGITKNILENFLDFIETIGFVPNGARIYYLNRSQPPLLTKMIKIYVDHTKDTSILQRALPLLIKEHEWWTNNRSVTVTGPNGKTYTLNRYHVNNNQPRPESFREDYITANNGSYYATSGIIYPVKSPLNETEKDETYANLATGAESGWDYTARWLRTPNDAAKDVYFPLRSLNVRNMIPVDLNSILYQNEVIIGEYLEQAGNKSEAQRWFQAANQRSEAMYALMWNATHWSYFDYNLTSNSQYIFIANDEDATTAEQANSPPGQQVLFSISQLYPFWTGAAPDQLKKNPLAVQQAYYRIERMLNEKAGAIPSTNFRTGQQWDEPNVWPPLQHILMQGLLNTPATFGTADPAYAAVQNLALRLAQRYLDSTFCTWYATGGSTSQTPQLQGVSPGATGIMFEKYADNATNVAGSGGEYEVVEGFGWTNGVLIWAAETFGNKLKRPDCGDIQAAHTHTDKKKRWSVDGEVRARERMAVELDPWDAKWTKMFGQAKGRVGRRS

SEQ ID NO: 202 - protein, 508 aa, Rhodothermus marinus
QDRVACQVPLPSVERIEAVRAYIRQSWDVLTRSHRDLLAAVQDPKIEHEPGTPWPLYIAATEDSVAVWHRLQQELPDSVLQQIVLRVLPEDPVAHLDEIHPHGLLYLPEPYVVPGGRFNEMYGWDSYFIVVGLLRDGRVDLAKAMTDNHLYQVRHYGKVLNANRTYYLTRSQPPFLSAMVLAVYAHTQDRDWLAAAVPLIERYYAYWTTPPHLAGETGLSRYYDLGEGPAPEVVAGERDAQGRTHYDRVREYYRMHEVTAYDESLYYVAEADSLTPLFYKGDRSMRESGFDPSNRFGPFSVDIIHYAPVGLNALLYRMETDLARIHEILGDTAAAAAWRARAEARRERVDRYLWDSERGLYFDYNFRTGRRSDYVFATTFYPLWVGMASPEQAARVAANLYLLEAPGGLLTSTHISGSQWDAPYGWAPLYLIAVEGLRRYGYDEAADRLTAKFVSMIVEDFERTGVILEKYDVVQRRSDVALRYGYTSNEIGFGWTNAVFAELLAQMD

SEQ ID NO: 203 - protein, 674 aa, Myceliophthora sepedonium
LYINGSVTAPCDSPIYCQGELLKAVELARPFVDSKTFVDMPTIKPVDEVLAAFSKLSLPLSNNSELNAFLYENFAQAGHELEEVPDSELETDAKFLDKLEDRTIKEFVGKVIDIWPDLTRRYAGPSNCTECANSFIPVNRTFVVAGGRFREPYYWDSYWIVEGLLRTGGAFTHISKNIIENFLDFVDTIGFIPNGARIYYLNRSQPPLLTLMVKSYVDYTNDTSILDRALPLLIKEHEFFMNNRTVSITGSNGKEYTLNRYHVENNQPRPESFREDYITANNGSYYASSGIIYPVKTPLNETEKAALYSNLATGAESGWDYTSRWLGVPSDAARDVYFPLRSLNVRDIVPVDLNSILYQNEVIIAEYLEKAGNSSAAKRFATAAEQRSEAMYSLMWNATHWSYFDYNLTDNTQHIFVPADEDTAPQDRIEAPPGQQVFFHIAQLYPFWTGAAPASLKANPLAVQQAYARVARMLDIKKGAIPATNYRTGQQWDQPNVWPPLQHILMKGLLNTPATFGKSDPAYQSVQNLALRLAQRYLDSTFCTWYATGGSTSDFPQLEGVTPGATGVMFEKYADNATNVAGGGGEYEVVEGFGWTNGVLIWAADVFGNKLKRPDCGNITAAHTHSSAKRGLEENKLPRRAVELDPWDAAWTKMFGRSKLRRREAEDVRKRWMS

SEQ ID NO: 204 - protein, 657 aa, Moelleriella libera
LHTNGSLIAPCDSPIYCYGDILKQVELARPFADSKTFVDMPGVKPLAEIQAAFDKLEKPLRNNTALQDFLKTYFADAGQELQEVPKSELKTDPQFLKTLNDTVIREFVTKVIDIWPDLTRSYKGSNTNCTDCPNSFIPINRTFVIAGGRFREPYYWDSYWILEGLLRTRGSFTQIAKNTLENFLDFVEQFGFVPNGARIYFLNRSQPPMLSQMVKLYIDHTNDTAILQRALPLLVKEHAWWMNNRTVDVQVGGKTYKLNRYAVSNTEPRPESYREDFETASNSSYYAQSGIIYPETKKLNDSQRAVLYANMATGGENGWDFSSRWIANPSDSVRDVYFPLRTNNAQNVVPVCLNSILYGNEMTIGGFFNSTGNTTAGQEWAAKAKARSEAMHATMWNETHFSYFDYNLTSSAQDVYTLADDDTSIYDNGTLTGAPPGYQVAFNGAQFYPFWQGAAPTYLKENPQAVKTAYARVAQYLKVRKGGIPATNLKAREQWDQPNVWPPLMHILMQGLLNTPPTFGSSDPSYKSVRSMALTLAQRYLDSTFCTWYATGGSTSETPKRPGLPEKDKGIMFEKYADNSIDIAGSGGEYEVVEGFGWTNGVLIWAADTFANELKRPDCGNGSSSSSTSSAAKRGLSAVELHPADASRIKRFGSSKG

SEQ ID NO: 205 - protein, 660 aa, Acremonium dichromosporum
IYVDGNITAPCDSPVYCYGEMLHQIQLAKPFDDSKTFVDMPALKPLSQIQAAFDRLDKPLSNNSALNNFLDEFFADAGGELSEVDKADLETDPVFLDKIDDEVVKEFTNKVIDIWPDLTRRYSGAAASNCTNCPSSFIPLNRTFVVAGGRFREPYYWDTYWIIEGLLRTGGSFTDISRDIIENFLDFVDQFGFVPNGARIYYLNRSQPPVLSRMVQAYIEHTNDTDILDRALPLLMKEHEFFSENRTIDIEGPNGTTYTLNRYDVRNNQPRPESYSEDYETATNTSYYSHDSGIIYPETEPLNDTERANLYSALASGAESGWDYSSRWIARPRDAAEDVYFPLRSLNTNNIVPVDLNSIMYANEMAIAGFLNQTGNASAAAEWEELAYNRSEAIHALMWNETYMSYFDYNLTSAAQHIYVPADDDVSTLESSTAPEGHMVLFSVSQFYPFWTGAAPSYIKNNPFAIAQIYKRVETLLDTRKGGIPATNFRTGQQWDQPSVWPPLMHILMAGLQNTPATFGEDDPAYQHVHEIALRIGQRYLDSTFCTWRATGGATSETPQLEGFTDRDVGIMFEKYADNSTNIAGGGGEYEVVEGFGWTNGVLIWTVDEFGNELKRPDCGDLEAADTTERRKRSALQLAPRDAQRTKKFGKRAVERQPWF

SEQ ID NO: 206 - protein, 667 aa, Fusarium sambucinum
LYVNGTVVAPCDSPIYCHGDILEQVELARPFSDSKTFVDMPAIRPLSEIQKAFDELDKPLRNNSALADFLSENFADAGNELEEVPEDELKTDPKFLDNINDTVIREFTEKVIDIWPDLTRRYDQDSKNCSDCPNSFIPVNRSFVVAGGRFREPYYWDSYWIIEGLLRTGGSFVNIAKNTIENFLDFIEEYGFVPNGARIYYLNRSQPPLLSQMVKIYIDHTNDTDILERALPLLVKEHEFFMKNRSVPVYINDETYMLNTYNVSNTQPRPESYREDYITATNKSYYSTSGEVYSGGEELSFKQKETLYGNLASGAESGLDYTSKWIARPENAIRDNYFPLRYLNTRNIIPVDLNSILYGNEIAIADFYEQTGNSSASEQWREVAANRSYAMHAFMWNETLWSYFDYNLTSKAQQIYFPADNNTVSVDTEDAPKGQQVFFSPTQFYPFWLGAAPDYLKNNPYAVLSAYKRVATYLDKREGGIPASNIETGQQWDQPNVWPPMMHILMAGLEKVPATFGIMDPSFIEIRKLALRLGQRYLDSTFCTWYATGGSTSETPKLESVSDKEDGIMFEKYADNATNTAGGGGEYEVVEGFGWTNGVLIWAVEEFGNRLTRPKCKNLETAHSSDKRDTSAVMLHARDAKHVKKFGRRKRAEEKAAKKRSSRLFHF

SEQ ID NO: 207 - protein, 660 aa, Phoma sp.
LYQNGSIIAPCDSPIYCYGDLLREIELAQPFSDSKTFVDLPTIRPLDEVLRAFNNLTKPIQNNTELNNFLTTYFGEAGSELDALPKDQLETQPDFLDNVNSSVIVNFTSQVIDIWPDLTRRYVGAGNCTGCVSSFIPVNRTFVVAGGRFREPYYWDSFWIIEGLLRTKGSFTQIAENIIENFMDLVEELGFVPNGARRYYENRSQPPLLTQMVRVYVEYTQNYTLLERALPVLEQEYEFWVNNRSVTLERGGKNYTLHHYNVSNTQPRPESYREDYITANNLTYYNENGEQFNASHPLNDTQKALLYAELASGAETGWDYSSRWLANPSDAVNDDFFPLRSLNVINTIPVDLNSILYYNEITIAEFHRREGNYCAARQWAELARNRSEAMTALLWNAEYYSYFDYNLTSSAQNIYTLADNTSTPLSLAGAPAGYQVGFQLSQLYPFWTGAAPDSIKGDPTAIRRAFARVEEALDTEAGAVSATNLFTGQQWDEPNVWPPLQYIAIQGLLNTPLEVSEDDDEQTAEDYVWTQNLALRLAQRYTDSLFCTWRSTGGATEEEPQLPGATGNGTIFEKYSDEAINARGGGGEYTVVEGFGWSNGVLIWAVDNFGQKLTTPDCGNITAAAPPSTASKRKRSAVEIHQRDAAWIKGTKENKMFGKK

SEQ ID NO: 208 - protein, 737 aa, Lentinus similis
LPQAVTPSSTSVSSQTVSTAVPSPTASLTSTLPSQIPLPPKQDWCPSEIFCAGELLQTVNVAQLYPDPKTFVDKPTARKSQQVVSNFQNIGGNSSNVTVGAIEDFVNSNFKGEGLELEPIAFANFNPTPAFLNNVSDPLVKAWSQIVHGYWTQLTRSTNDSALCPEGTESGSCESSLIPLNHTFVVPGGRFREQYYWDSYWIVQGLLVSELYDIVNDTLQNFMDELEHIGFIPNGGRIYYLNRSQPPLFIHMLTSYVQASGDTSILKRALPLAEKELAWWSANRSVQVKSPYTNATHNVYRYHVTNTAPRPESYYTDYITANDPTLQTPLTEQQRADLYAELATGAESGWDYSSRWLKEPLAGGSNNTSPALRSLNIRSLVPVDLNSILYKAHLNLAALYNNESHSAAASNHTQAAIALREAILDLHWDANKRAFYDFNITSNARNDIFSAATFYPLWSGIIPDEILSDGSGATAFGAFAAVNMVLNRYNGTFPVTFLETGLQWDAPNAWPPHQFIIIEALRNLPSNITNTPLPSAPSGNSTYALIPAGQVGIAEGDLPGQILSPGQNATKTGPAADINTLNGTVVNGGNATSGEGWAAVLQRELANRYIASALCSWHATGGEVPNLLPRLSDSQLQITQSQNNTGNMFEKFSINDIDSAGRGGEYTVQAGFGWTNGVVLYLTHVFGDKLVAPSCPNLVALSSNTATTSGAVAQMTLPSSLAVTVGAVVLGFVGLVL

SEQ ID NO: 209 - protein, 683 aa, Diaporthe nobilis
QTLDGIYYDGDNIAPCSSALYCYGDILDSIQRAKPFADSKTFVDMPTRVPLEEVRAAYDQLTKPLQNNTELLDFLSNNFGPAGQEVVPVDPGSLGVNASFLGGIANAVNREFTEAVIDLWPNLTRWVNESAVCAECDNSLLSIKRPFIVAGGRFREPYYWDSYWILHGLLRSGGNFTRIARNQIENFLDFVEDYGFVPNGARVYYLNRSQPPLLAQMVRIYIEQTGDATILDRAIPLLIREHDFFMSNRTVHVSVGSRNYTLNRYNVANTEPRPESYYEDYTQVNNASYYANDGRVFPTRNTTQAEKDLQYKNLASGAESGWDFSTRFMRDPTIAANDTYFPLASYNIINIIPVELNSILYWNEVTIAAFLRQQQQQVPNATAEADADAWDARAASRSEAMYSVMWNETLGGYFDFNLTSGSQDVFWARDADSLPTEQAGTEPGQQVVFNIGQLSPFWTGAAPRSLAGDPAAVRRAFSRVDEYLGSRKGGIAPTNFVSGQQWDQPSVWPPHMHILMEALLRTAEAGGESEGGSEDWAWAQDLALRLGQRYFDSAYCTWRATGGGTPSSPPLANPPQDLGGQMFEKYSDQSLNEAGSGGEYVVVVGFGWSNGVLIWVADTFRDRLQTPACGDLTTRGEAGKMREKRMSENGRHGDGSNAISAVKLDYFDAAWTSENVGGLHGVR

SEQ ID NO: 210 - protein, 763 aa, Solicoccozyma terricola
QGNSSMSASNATSSSTGTGTSSSAAAVMTAVPMPTAPLSSPVEMLPLPPVQPWCNGGENATYCPGSLMQLVQLSGIYNDSKTFPDKPTQYNASVTYQAFDALPVNATVGDVETFVEKYFKGEGQELETVQIQNFTQNPTFLNVIDDELYKGFVSTVNGYWSLLVRQTNESALCTNGACESSLIPLNRSFIVPGGRYREIYYWDSFWILEGLLKSELYLYAYNLLENFMDLIEKFGFLPNGGRSYYLNRSQPPVFVQMLNAYIQVTGNVSILTRALPIAETELQWWRTNRTISVTSPYTGTNYSVARYFVTNSAPRPEGYVEDITTAFGGNPALNESARSALYAELASGAETGWDYSSRWCKQPLLNLTDNDPALRTLNVRQQIPVDLNSLLCGDHVLLANLYEFYMNSTIGGGSGISSGGGNSTIGMGAWANSTSGSNMTSNSTSSSNMTGLVQSHRMIAKEFEAAINDLMWDKQKLWWYDFNMTANARADVYHPGGLFPLWQNITPSDIVGNDTAAFGVFAGVRYMVGMYPGPPAPASLIQTGLNWDAPNVWPPHVYTGIKALETVLRINPNSSVVPNITLTDFTRIPTGQLGLNQSQLPPQPASALGNGTADLDQAIAQMQKGKPWPTALAIEFANRYLQSAFCSWYSTGGSIPGLLQQLSPQELNLTGSLTTGSQAMGNIFEKFNLTNVDAAGGGGEYTVQIGFGWSNGVILHTAGEYGQYLVQPSCPLIAIHETANATSTNATKSNNTMVFSGYRLPHD

SEQ ID NO: 211 - protein, 734 aa, Dioszegia cryoxerica
QSSSSSSFSPTPVTTAVPSATAALNQTVSGQGVYPPLQPWCNAGENATYCPGVILQDVQLSGLFPDSKTFVDKPTNGTQNATQQAFQQLGNNITLGQLAQFVNTSFRGEGLELSQVPINGFVANPAAVNKVSNPLYRGWVSTVNSYWSLLIRETNQSAVCTTQCESSLIPLNYTIVVPGGRYREIYYWDTFWILEGLLKSELYTYAWDVLQNFMDFVDVYGFIPNGGRKYYLNRSQPPVFIQMLDAYVKATGNVTILERALPLASEEMRWWINNRTTQVTSPFTGITRRVYVFNVTNSAPRPEGYVEDYEAAFGAQPPLTEAQRGALYAELATGAESGWDYSSRWCKQPVINVTDNLPALRTLNGRSIVPVDLNSLQAGNHALLARLYEVYINASTTSNTTAAQTIRANATQEIALHKTLANDYSQAVLDLHWDPARAWFYDFNLTSNSRESLYTPAGTFALWQNITPPGLEGNDTAALRIASGARYLLGRYGGIQGVSSLLVTGLNWDFPNSWPPHTYTSIKAFQTLGRLVGNASIVGNATIPFSQVATNQLGLNETQLPPQDPALQGNASLTVPSARNVSWPLALEIEYASRYMQGAFCSWYSTGGSISGLLTQLPVSQLNATGTYQAGQTGQMFEKFNATDIDAAGGGGEYTVQIGFGWTNGVVLWLADNFGQYLPQPTCPLVVLSLTNLNSTTAGNSTNGTSPAAPGNATSLVAVSELQGIWEGQRVSRD

SEQ ID NO: 212 - protein, 1020 aa, Talaromyces funiculosus
LPFNERVDQVLRSYEVTSKLDSRSTKPSKHGHTYQTQFLGVTWDQRNWRLQSTVLDQGHYESRGSIANGYIGLNVAGAGPLFELDSPVDGDVINGWPLFSRRQTFAGLAGFYDLQPRTNGTNFPWLSQYGDDSAISGVPHWGGMVLDLGDGEYLDATVDNSTISDYTTTYDYKAGVLSWDYKWTPKNANGSFGISYKIFANKLDVNQAVVQLSITPSTNGSASVVNVIDGYAAVRTDFVSSGNESDVVYTAVKPNGVTNVTAWIYTALDGDDAFDISSAALVNDKPYVHQNDSSIAQSVNVTFTAGTTITINKFVGAASTDAFPDPQSTAREAALSARRRGFDDLFRSHISEWAQVMPDDSVDDFTLANGTLPNDTFIIESAVMAVVNPYYLLQNTVGPNALRRVNNAPVNDWSIPVGGLTSDSYAGQIFWDADVWMQPGLVAAFPESAKRITNYRAAKYSQALENAKTAYTSSQNQTWFSPDAAIYSWTSGRVGNCTATGPCWDYEYHLNGDIGISLVNEWVVSGDNETFKNKHFPIYNSIATLYGDLLKKNGSYYTLTNMTDPDEYANNVDAGGYTMTLISQTLSNANAFRKQFGMNENTTWTEMADNILLIRENDVTLEYTTMNNSVAVKQADVILSTFPLDYTKNYTTSAALNDLDYYALKQSPDGPGMTYAIFSIVANDVSPSGCSAYTYAQYSYDPYIRGPFFQFSEQLLDDYTINGGTHPAFPFLTGHGGANQVVLYGYLGLRLLPDDMLHIDPNLPPQIPSIKYRTFYWRGWPIQAASNYTHTTIQRATTVAPLSTADPTYANKSIHVSVGHNTVNSTTYSLSANGSALVVPNRQIGSINTVAGNVVQCKSVLSTDAYQKGQYPISAVDGAASTKWQPEFAANISSLTVDLTGSNVSSVSGFYFDWAQAPPTNITVLLHNSSSAALASSGDKPGSSAVTLNITISNPYNASTYNANIIALPSSNSTNYTFPAPVPKPRYATLFVQGNQALDETDTKSGNGTGATVAEWAILS

SEQ ID NO: 213 - protein, 1063 aa, Hamigera avellanea
ASPKSRINQCLKKHAGQGSHDDETSSNVYQTRFPGVTWDEDNWSLTTSVLDQGHYQSRGSVANGYLGINVASVGPFFELDIPLNGDVINGWPLYSRRQTFATISGFFDSQPETNGTNFGWLNQYGGESVISGVPHWSGLILDLGDGTYLDSTVDNATLSGFTSSYDFKAGVLSWSYQWTPEGKHGSYDITYRLFTNKLYVNQAVVDMEIVPTVAGKASVVNVIEGSSAVRTDFVESGEDDGAIFSAVRPWGISNVTAYFYANLTVSDNVDLSSRTLVSNKPYVSTNESSIAQSVDVQFIPGKSVRITKFVGAASTDAFANPQETAKRAASTAQTNGYLKSLNSHIAEWASVMPDDSVEDFSLPETGKLPADEHIIESAIISVTNTYYLLQNTVGKNAIKASSDAALNMDSISVGGLTSDSYAGLIFWDADIWMQPGLVASHPEAAEVFTNYRVAKYPQAVKNIETAFASSKNQTNFSPSAAAYPWTSGRYGNCTGTGPCFDYQYHLNGDIGLSMINQWVVSGDTQTFREKHFPIYDSAATFFSNLVERNGSTWTLTNMTDPDEYANHIDAGGYTMPLIAETLLYANSFRKQFGVEPNETWNEIAENVLVLRTNGVTLEFTSMNGSAPVKQADVVLVTYPLDYNNNYSPEDSLNDLDYYANKQSEDGPAMTWAIFSVVANEASPSGCSAYTYAQYAYYPYARAPFFQLSEQMIDDASINGGTHPAYPFLTGHGGANQVNLMGYLGLRLLPDNVIHVDPNLPPQIPHLKYRTFYWRGWPMSAASNYTHTTIQRAVNVPALSTADQKFANVSIPVHVGPETNATVYRLPVNGTLTIPNRQIASKNTVAGNLIQCRPVESQNDFQPGQFPISVVDGASSTRWQPKHADNVSAVTVTFADEEVGSLVSGFYFDWAQAPPVDAAVIFHNSSLENPASAFSFASNSSSSEYSVITTLKNVEQSDPYDPESDKLDIIAIPTGNTTKVTLPSAVPAARYATLFITGNQALGPEDIAAKNGTGATVAEWAIVGQTSSATSKRSIQTRKLQVRSGAALSGLGFAQRRRQSAEMY

SEQ ID NO: 214 - protein, 1020 aa, Talaromyces ruber
LPFNERVDHVLRSHDLTSRLHSRSAKPSNHGGTYQTQFTGVTWDQRNWRLQSNVLDQGHYESRGSIANGYIGLNVAGAGPFFELDTAVDGDVINGWPLFSRRQTFAGLAGFYDLQPTTNGSNFPWLDQYGDDSVISGVPHWGGLVLDLGNGEYLDATVDNSTISDYSTTYDYKAGVLSWHYKWTPKNANGSFEIKYKIFANKLDVNQAVVQLSITPSANGSASVANVIDGYSAVRTEFVASGNESDAIFTAVKPVGVSNVTAWIYAALDGDDAFDFSSATLVNDKPYVHQNDSSIAQSVNVTFTAGTTITINKFVGAASTDAFPDPQSTAREAALKARRRGFDDLFRSHISEWAQVMPDDSVDDFTLANGTLPNDPFIIESAVMAVVNPYYLLQNTVGPNALRRVNNAPVNDWSIPVGGLTSDSYAGQVFWDADVWMQPGLVAAFPESAKRITNYRTAIYSQALENAKTAYTSSQNQTSFSSDAAIYSWTSGRYGNCTATGPCWDYEYHLNGDIGISLVNQWVVSGDNDTFKNTHFPIYNSIATLYGDLLKKNGSYYTLTNMTDPDEYANNVDAGGYTMTLISQTLSNANAFRKQFGMDENTTWTDMADNVLLIRENDVTLEYTTMNNSVAVKQADVILSTYPLDYTKNYTTSAALNDLDYYALKQSPDGPGMTYAIFSIVANDVSPSGCSAYTYAQYSYDPYIRGPFFQFSEQLLDDYTANGGTHPAFPFLTGHGGANQVVLYGYLGLRLLPDNVLHIDPNLPPQIPSVKYRTFYWRGWPIQAASNYTHTTIQRATSVAPLSTADQTYANRSISVQVGQNTVNSTTYSLPANGSAIVVPNRQIGSINTVAGNIAQCKSVLSTDAYQPGQYPISAVDGAASTKWQPEFAANISSLTVDLTSSNASTVSGFYFDWAQAPPTNITVLLHNSSNAPLTSSNSNGGNSTVSLNVTISNPYDASAYNANVITLSSSNTTNYTFPAPVSKPRYATLFVQGNQALDETDLKAGNGTGATVAEWAVLS

SEQ ID NO: 215 - protein, 1055 aa, Trichoderma lixii
ATSNNRVSECLGRNGGSSTGVHFSKNVYKTDFAGVTWDEDNWLLSTTELKQGAFESRGSIANGYLGINVASVGPFFELDTEENGDVISGWPLFSRRQSFATIAGFWDSQPVMNGTNFPWISQYGSDTAISGIPHWSGLILDLGGNTYLDATVDNRTISNFRSTYDYKAGVLSWSYKWTPKGNKGSFDISYRIFANKLYVNQAVVDLQVTASKNVEASIVNVIDGFAAVRTDFVESGEDGNAIFSAVRPNGVANVTAYVYADITGSGGVDLSSRKIVHNKPYVHANASSIAQAVPVKFSAGRAVRVTKFVGGASSDAFKNPKQIAKSAAATALKNGYSKSLNSHVTEWAAVMPESSVDSFADPKTGKLPNDNYIIDSAIIAVVNTYYLLQNTVGKNGSKAANGAPVNVDSISVGGLTSDSYAGQVFWDADLWMQPGLLAAHPEAAERIINYRLARYGQAKENVKTSYAGSQNETFFSASAAVFPWTSGRYGNCTATGPCWDYEYHLNGDIGLALVNQWVVNGDTKDFEKNLFPVYDSIAQLYGNLLKPNGTAWTLTNMTDPDEYANHVDAGGYTMPFIAETLQNANTFRKQFGIEQNKTWNDMASNALVLRENGVTLEFTTMNGSAVVKQADVIMVTFPLSYTTNYTTEDALNDLDYYANKQSPDGPAMTYAFFSIVANEISPSGCSAYTYAQYAFKPYVRAPFYQLSEQIIDDSSINGGTHPAYPFLTGHGGANQVVLFGYLGLRLVPDDFIHIEPNLPPQIPYLRYRTFYWRGWPISAWSNYTHTTISRASGVAALDGADQRFAGKTITIHSGPEESPKAYHLPVKGSVVVPNKQIGSQQTYAGNLVQCHAASSPSDYVPGQFPIAAVDGATSTKWQPASADKLSSITVSLDQEDVGSLVSGFHFDWAQAPPVNATIIFHNEAINDPATVLKSQKHNSNYKVVSSLTNIKQSNPYIKTTDLDIIAIPIGNTTNVTLSQPVAASRYASLVIVGNQGLDHADVVGKNGTGATVAEWAIIGHSKGHTGAPGHHGKRKLNLRAAAAMSDPDSFARRRQ

SEQ ID NO: 216 - protein, 1056 aa, Aspergillus cervinus
STFSHKNDRILKGLKRHGDHYSRKSNTNSTDVYQTKFDGVTWDDDNWLLTTTALDQGDFRSRGSIANGYLGINVASVGPFFELDTAENGDVISGWPLFSRRQTFATIAGFFDSQPTTNGSNFPWLYQYGGDSVISGVPHWSGLVLDLGNDTYLDSTVDNQTIENFTSMYDYKSGVLSWSYTWVPAGNKGSFDIVYRLFAHKLNVNQAVVDMEITPSLSFNATVVNILDGYSAVRTDFVESGNDNGAIFTAVRPWGISNVTAYVYANLTGTPNVDLSSRTIVANKPYVHTNASSIAQAVNVSCSPNETVRITKFVGAASSDAFENPQETARQAVSAAIGAGYLRSLGTHIAEWASIFPDDSVDRFTDPATGKLPANKHIINSAIIAVTNTYYLLQNTVGKNAIQAVSGAPVNIDSISVGGLTSDSYAGQVFWDADVWMQPGLAASHPEAAQRITNFRAAKYPQALANIETAFTSSKNQTSFSPSAAAFPWTSGRFGNCTATGPCWDYEYHLNGDIGLSLMYQWIASGDTQTFRETHFPIYDSIATMYSNIVERNGSYWTLKNMTDPDEYANQIDAGGFTMPLISQTLNYANAFRQQFGLDVNQTWSEIANNVLVLNDNGVTLEYTTMNGSTVVKQADVVLDTYPLVYSNNYTSQNSLDDLDYYANQQSPDGPAMTWAIFSIVANDVSPSGCSAFTYHQYSYDPYARAPFFQLSEQLIDDASTNGGTHPAFPFLTGHGGANQVVIFGYLGLRLLPDEAIHIDPNLPPQIPHVAYRTFYWRGWPISAQSNSTHTTISRAMNASPLDTADSRFANVSIPIYVGTESNATVFQLPPTGPLTILNRQNGFNNTIPGNVAQCRPVYSPDDYAPGQFPIAAVDGATSTRWQPSSANTSSVTVTLPDTQINSPVSGFYFNWWQLPPVNATVIFHDDLLENPAATISSSGNSSSYRVVMTLTNIQQSSPYNAQIAALDEITIPTGNTTTVQLTNHAQTSRYATLLISGNQGLGDTQDGVGATVAEWVILGQGQGSSSSNSNGKRKLGARSAAALSNGWTERRRRLI

SEQ ID NO: 217 - protein, 1053 aa, Rasamsonia brevistipitata
LRSEARVAQVVRAYSSSTGVEAGHGNATQYETRFPGVTWDQRHWRLKSTVLDQGHFQSRGSIANGYVGINVASAGPFFELDTPVDGDVINGWPLFSRRQTFATIAGFYDEQPRTNGSNFDWLYQDGGESVISGVPHWSGLILDLGDGTYLDATVDDSTISDYSTVYDYKAGILSWSYKWTPKSSKGSFKISYRLFAHKLNINQAVVRMEITPSADTDATVVNVLDGYSAVRTDFVGSGKDGDAVYSAVSPWEVQNVTAYVYAVLDGSDGVDLSTLSLVNGKPYVHTNESSIAQSVNVRFRAGKTVTVTKFVGAASTDAFPDPQQTAREAALAAKEEGYDALLRSHVAEWAAVMPEESVDDFTYHNGTLPGDDFIVESAIMAVVNPYYLLQNTVGENALREVSHAPVNEWSISVGGLTSDSYAGLIFWDADLWMHPGLAVAFPQAATRITNYRVAKYEQARQNAKTSFTGSKNQTWFSDSAAVYPWTSGRYGNCTGTGPCWDYEYHLNGDIGLSLINEWVASGDTKTFQESYFPIYDSIATLYADLLQQNGSHWTLTNMTDPDEYANAVDAGGYTMPLIAQTLLYANSFRQQFGAQPNSTWTEMASNILFLRENDITLEYTTMNNSVQVKQADVVLVTYPLEYTTNYNAGNALTDLDYYALKQSPDGPAMTYAIFSIVANEVSPSGCSVYTYAQYSYDPYVRPPFFQLSEQLVDDYTLNGGTHPAYPFLTGHGGANQVVIFGYLGLRLLPDNVIHIDPNLPPQIPQVKYRTFYWRGWPIQAYSNYTHTTIGRAADVLALDTADQRFANTTIPVQVGSGSNATVYQLPIDGVLTVANRQVASTNTVAGNLAQCQPVDSSDSYVPGQYPLAAVDGAASTKWQPSFAANVSSVTVSLPESESGTLVSGFYFDWAQAPPVNATVVFHNNTVENPTRYMSSPTFVTHIDNITLSSPYNAEANPAATILLPSSNTTNVTLAHPMPVPRYATLFITGNQALSESEVQAQNGTGATVAEWAILASNPETGSSKRNLQLRGVGRSALAGLPRRANRKERRTDV

SEQ ID NO: 218 - protein, 1034 aa, Acremonium curvulum
LEERVSQTLNRHGVRSSYNRRADNGDQNRISNTSHPYIYQTSFEGVTWDSRNWRLQGTVLDQGHYQSRGSIANGYFGINVASAGPFFELDTPVDGDVINGWPLFSRRQTFAGLAGFWATQPTTNGTNFPWLYQYGDESPISGIPHWGGLVLDLGDDVYLDATVDNKTIKNYRTTFDYKAGVLTWDYTWSPKKRGSGSFDITYSLFANKLDINQAAVRLSIRPSRDTKAKVVNVLEGYAAVRTDFVDSGKDGDAIYSAVRPVGVNNVTAYVYAVLDADSAVDLSSAKVIDDAPYLYTNKSTIAQSVNVEFKANQNVTITKFVGIASTDAFPKPRDVAKQAAFAGKRRGYDDALRSHVSEWAQVMPDDSVDDFSSDNGTLPDDGFIIESSIMAVVNPFYLLQNTVGANALRRVNNAAVNDYSISVGGLTSDSYAGLVFWDADIWMQPGLAAAFPEAAQRITNYRVALYPQAKRNIKTAFQSSKNKTRFSDDAALYPWTSGRWGNCTASGPCFDYEYHLNGDIGIAFVNEWITSGDEKAFEEKYFPIYDSIATAFANLLQKNGTQWTLTNMTDPDEYANHVDAGGFTMPLISQTLTYANLFRKKFGKEENDTWADMAENVLILRENDVTLEYTAMNNSVEVKQADVVLNTFPLDYTRDYAPSAALNDLDYYALKQSPDGPAMTYAIFSIVANEVSPSGCSAYTYAQYSYSPYLRGPFHQLSEQLTDDFTTNGGTHPAYPFLTGHGGANQVVLFGYLGLRIVPDDKIHVDPNLPPQIPQVKYRTFYWHGWPIAAKSNYTHTTISRATTIKELDTANKKYANASIQVVVGSGKSAKTYKLPANGSSIVVANRKIGTVNTLEGNMIQCQPAQSFDTFVPGQFPISINDGAASTKWQPEFANNISAVTVTVPASKSKKISGFYFDWAQAPPTNATVVLHDEKMDNPTMVLLPVSKDDDKKGSVARVNVTISEPWSAKDKSNFVIGLQGGNTTNFTFSEPVAAKRYATLFIQGNQALDKVDIKYKNGTGATVAEWGILSDDA

SEQ ID NO: 219 - protein, 1015 aa, Talaromyces piceae
ARVDQVLQARDTHHPSLHSSSSYQTRFDGVTWDQRNWRLQSRVLDQGHYQSRGSVANGYLGINVASAGPFFELDTPVDGDVINGWPLFSRRQTFAGLAGFYDRQPTTNSTNYGWLNQYGDESVISGIPHWSGLVLDLGDGHYLDATVDSSTISDYTTTYDFKAGVLSWDYNWAPRQHGGGNSSFHISYQLFAHKLDINQAVVKLSITPSASGNASVVNVIDGYSAVRTEFVKSGTDGDAVYSAVSPVGVSNVTAWVYTVLDGDEAFNLSSAQLVTGKPYVYQNDSSIAQSVNVEFRAGETVTITKFVGAASTDAFADPRQTARDAALLAKKKGFDDLLRSHVSEWAQVMPDGSVDDFTREDGTLPDDEFIIESAVTAVVNPFYLLQNTVGKNALQRVSNAPVNDWSIPVGGLSSDSYAGLIFWDADVWMQPGLVAAFPESAQRITNYRAAMYRQARANIQSAFASSQNKTVFSPDGAIYPWTSGRYGNCTGTGPCFDYEYHLNGDIAISLVNQWVVSGDTETFKNEHFPIYDSIATMYADVLKKNGSFYTLTNMTDPDEYANNKDAGGFTMPLIAKTLLNANDFRKQFNMEENSTWNEKAASVQILRENDVTLEYTTMNNSVAVKQADVVLMTFPLDYTANYSSSSALNDLDYYALKQSPDGPGMTYAIFSIVANQVSPSGCSAYTYAQYSYYPYARAPFFQLSEQLLDDYTANGGTHPAYPFLTGHGGANQVVLYGYLGLRLVPDETLYIDPNLPPQIPQVKYRTFYWRGWPIQAASNYTHTTIRRATTVAPLDTADEKYTDEAITLHVGQQSDGNKYQLPADGTPVTVANRRVSSVNTVKGNMIQCQPVQSTASIQPGQFPIAAVDGAASTKWQPEFAANASSLTVEIPSSGKKRKTVSGFFFDWAEAPPTNATVVLHNNPVSEPTLSSFEAGKDGVVLRAFDIEISSPYNASTYADEIIIPQGNSTNYTFSHPVPAPRFATLFVQGNQALDKVDVENKNGTGPMVAEWVILE

SEQ ID NO: 220 - protein, 1022 aa, Penicillium sp.
LPLEERVDRVLRSYSVGSGLEARHSKYTYQTQFDGVTWDQQNWRLESTVLDQGHYSSRGSIANGYIGLNVAGAGPFFELDAPVDGDVINGWPLFSRRQTFAGLSGFYDVQPTTNGSNYPWLDQYGYDSVISGIPHWGGLVLDLGNGDYLDATVDNSTISDYTTTFDYKAGVLSWDYNWTPKNTSFGISYKIFSSKLDINQAVVQLSITPSANGTASVANVIDGYAAVRTEFVTSGNDSDALFTAVKPTGINNVTAWIYAVLDGDDAFDFSSATLVNNKPYINQNDSSIAQAVDVEFTADSTVTITKFVGAASTDAFADPQKTAKDAALAARIKGFEDLLRSHVSEWAQVMPDDSVDDFSLADGTLPDDIFIIESSVMAVVNPYYLLQNTVGENALRRVNDAPVNIWSIPVGGLTSDSYAGQIFWDADLWMQPGLVAAFPESAKRISNYRVAKYPEALANTNTSFAGSQNHTTFSSDAAIYSWTSGRYGNCTATGPCWDYEYHLNGDIGISLVNQWVTSGDTETFQNDLFPIYNSVATLYADLLKLNGSYYTLTNMTDPDEYANNVDAGGYTMTLISKTLSNANAFRKHFGLDQNSTWTEMAENVLVIRENDVTLEYTTMNNSVAVKQADVVLSTFPLDYTMNYTTSDAVNDLDYYALKQASDGPGMTYAIFSIVADKVSKSGCSAYTYAQYSFDPYIRSPFFQFSEQLDDDYTTNGGTHPAFPFLTGHGGANQVVLYGYLGLRLLPDNVLHIDPNLPPQIPSVKYRTFYWHGWPIQANSNYTHTTIRRATTTAPLSTADQTYSNTSITVQVGTSNGTTYSLRVDGTPLTIKNRRIGSVQTISGNIAQCQPVQSPDSYEPGQYPLSVVDGASSTKWQPESAANISSVTVTLGSSYSPGNSSNATASSILGFYFNWAQAPPDNITVVLHNASIPYLNASLSSLSNTTTTTSLNITVSNPYDSSADEKIIVLPSSNTTNYTFPSPVPVPRFATLFIQGNQGLDQTDLEYGNGTGATVAEWAILSA

SEQ ID NO: 221 - protein, 1020 aa, Talaromyces aurantiacus
LPFQDRVDQVLRSYSAKTLDIRSAKSSSKHGNTYETQFPGVTWDQRNWRLQSTVLDQGHYESRGSIANGYIGLNVAGAGPFFELDTPVDGDVINGWPLFSRRQTFAGLAGFYDLQPTTNGSNFPWLDQYGDDSAISGVPHWGGLVLDLGDGQYLDATVDNSTVSDYKTTYDFKAGVLSWDYKWTPKSSNVSFGISYKVFANKLDVNQAVVQLSITPSANGSASVVNVIDGYSAVRTDFVSSGNESDAIYTAVKPLGVSNVTAWIYATLDGDDAFDFSSATIVNNKPYVHQNDSSIAQSVNVTFTAGTTVTINKFVGAASTDAFPDPRSTAKEAALAGRRRGYDDSFRAHISEWAQVMPDDSVDDFTLANGTLPNDTFIIESAVMAVVNPYYLLQNTVGPNALRRVNNAPVNDWSISVGGLTSDSYAGQVFWDADVWMQPGLVAAFPESAKRITNYRAAIYSQALANAKTAYTSSQNQTSFSSDAAIYSWTSGRYGNCTATGPCWDYEYHLNGDIGISLVNQWVASGDNETFKNTHFPIYNSIATLYGDLLKKNGSYYTLTNMTDPDEYANNVDAGGYTMTLISQTLSNANAFRKQFGMDENTTWTEMADNVLLIRENDITLEYTTMNNSVAVKQADVILSTYPLDYTKNYTTSAALNDLDYYALKQSPDGPGMTYAIFSIVANDVSPSGCSAYTYAQYSYDPYIRGPFFQFSEQLLDDYTANGGTHPAFPFLTGHGGANQVVLYGYLGLRLVPDDKLHIDPNLPPQIPSVKYRTFYWRGWPIQAASNYTHTTIQRATRVAPLSTADMTYANKSISVQVGQNTANSTTYSLPVNGSALVISNRQIGSINTVQGNIAQCKSVQSMNGYQPGQYPISAVDGAASTKWQPEFAANVSSLTVDLTSSNASSVSGFYFDWAQAPPVNVTVVLHNSTSASLTSSAAQNGSSTVSLNITISNPYNASSYDANVIELSSSNTTNYRFPAPVPKPRYATLFVQGSQALDETDMKAGNGTGATVAEWAILS

SEQ ID NO: 222 - protein, 1016 aa, Talaromyces pinophilus
LPFNERVDQVLRSYSPKNLESRSTKHGNSYQTQFSGVTWDQRNWRLQSTVLDQGHYESRGSIANGYIGLNVAGAGPFFELDTAVDGDVINGWPLFSRRQTFAGLAGFYDLQPTTNGSNFPWLSQYGDDSAISGVPHWGGLILDLGDGEYLDATVDNSTISDYTTTYDYKAGVLSWDYKWTPKNSKASFGINYKIFANKLDVNQAVVQLSITPSANGSGSVVNVIDGYSAVRTDFVSSGNESDVIYTAVKPVGVNNVTAWIYAALDGDEAFDFSSAELVNDKPYVHQNDSSIAQSVNVAFTAGTTITINKFVGAASTDAFPDPQSTAREAAMTARRRGFDDLFRSHVSEWAQVMPDDSVDDFTLANGTLPNDTFIIESAVMAVVNPYYLLQNTVGANALRRVNNAPVNDWSIPVGGLTSDSYAGQIFWDADVWMQPGLVAAFPESAKRITNYRTAKYSQALENAKTAYTSSQNQTSFSSDAAIYSWTSGRYGNCTATGPCWDYEYHLNGDIGISLVNQWVVSGDNETFKNTHFPIYNSIATLYGDLLKKNGSYYTLTNMTDPDEYANNVDAGGYTMTLISQTLSNANAFRKQFGMDENTTWTEMADNILLIRENDVTLEYTTMNNSVAVKQADVILSTFPLDYTKNYTTSAALNDLDYYALKQSPDGPGMTYAIFSIVANDVSPSGCSAYTYAQYSYDPYIRGPFFQFSEQLLDDYTANGGTHPAFPFLTGHGGANQVVLYGYLGLRLLPDDMLHIDPNLPPQIPSVKYRTFYWRGWPIQAASNYTHTTIQRATSVAPLSTADPAYANTSISVSVGQNTANSTTYSLPVNGSAIVVPNRQIGSINTVAGNIAQCVSVLSTDAYQPGQYPISAVDGAASTKWQPEFAANVSSLTVDLTSSNASSVSGFYFDWAQAPPTNITVLLHNSSSAALTSSSTHGGSSSVSLNITISNPYDASSYDANVIALSSSNTTNYTFSAPVAKPRYATLFVQGNQALDETDTKAGNGTGATVAEWAILS

SEQ ID NO: 223 - protein, 1069 aa, Talaromyces leycettanus
TSANARINRCVKKHAGGKTPSGPSNNTYQTRFPGVTWDQDNWCLSTTTLDQGHYESRGSVANGYLGINVASVGPFFEFDTPVDGDVINGWPLFDRRMSFATISGFWDQQPTTNGSNFPWLYQYGGESVISGVPHWSGLILDLGDNTYLDATVDSRTISGFSTTYDFKSGVLSWSYQWTPAGNMGSYNITYRLFAHKLYVNQAVVDMEVVSSTEAKATVVNVIDGASAVRTDFVESGQDDGAIYTAVRPWGIANVTAYIYANITGSDNVDMRSRALVTNKPYVNGNASSITQAVNVHFTPGKSVRITKFVGGASSDAFSNPQQIAKQACSTAQANGYVKSLRSHVAEWASVMPDDSVDDFTFPSNGTLPADEYIIESQIISVANTYYLLQNTVGKNAINASSSTELNKDSIAVGGLTSESYAGMIFWDADVWMQPGLVASHPEAAQRITNYRVAKYPQAKANVATAYQSSKNQTNFSPDAAVYSWTSARYGNCTATGPCWDYEYHLNGDIGLSIINQYVASGDTQTFKEKLFPVFDSVATLYSNIVQKNGSSWTLTNMTDPDEYANQVDAGGYTMPLIAQTLLYANSFRQQFGLETNDTWNEIAQDVLVIRENGVTLEFTTMNGSAVVKQADVVLDTYPLGYTHNYGPTDALNDLDYYANRQSPDGPAMTWAIFSVVANQISPSGCSAYTYAQYAFSPYARAPFYQLSEQLIDDASLNGGTHPAYPFLTGHGGALQVNLFGYLGFRYLPDNVIHIDPNLPPQIPHITYRTFYWRGWPITAASTYTHTTLSRAWNVSSLDSADPKFANASIPVHVGLESNVTVYRLPVNGTLTVPNRMVGSKNTLAGNMVQCRPVQSMDGYQPGQFPISVVDGASSTKWQPLYSANVSSVTVTLSSSAVGKSVNGFYFDWAQNPPVNAAVVFHNSSFAQNPATTFSFDNPSASGNLYSVVSVLKDIQLSDPYDPATTDLDVIAIPKGNTTNVTLSSPVPAARYATLFIQGNQANSPAEVAAKNGTGATVAEWAILGQEVQNNGYGDQIEARRLDVRGAAALSGMGSFTQRRKRKMILPRFD

SEQ ID NO: 224 - protein, 1016 aa, Talaromyces variabilis
ALSPGARVNQVLRAHNSLPPSLTDNSTGSSYKTRFDGVTWDQRNWRLQSRVLDQGHYEARGSVANGYIGINVASAGPFFELDTPVDGDVINGWPLFSRRQTFAGLAGFYDLQPTTNSTNYGWLNQYGDESVISGIPHWAGLVLDLGNGDYLDATVDNSTISDYTTTYDYKAGILSWDYKWTPRQNSSSFRISYQLFANKLDINQAVVKLSITPSKSGNASVVNVIDGYSAVRTDFVKSGSDGNAIYTAVSPVGVSNVTAWVYAVLDGDKAFDLSSPSRVTGKPYIHQNESSIAQAVNVEFSAGKTVTIAKFVGAASTDAFSNPQKKAKTAALDGKKKGFEDLLRSHVSEWAQVMPDDSVDDFTLANGTLPDDSFIIEQAVTAVVNPYYLLQNTVGKNALQRVNNAPVNDWSIPVGGLSSDSYAGMIFWDADVWMQPGLVAAFPESAKRITNYRAAKYQQAIANVKTAYSSSQNETVFSPNAAIFPWTSGRYGNCTGTGPCWDYEYHLNGDIAISLVNQWVVSGDTETFQNEHFPIYNSIATVYGDLLKKNGSYYTLTNMTDPDEYANNKDAGGYTMPLIANTLIKANEFRRQFGMAENATWNEMAENVLIIRENDVTLEYTTMNNSVAVKQADVVLRTFPLDYTTNYSSSAALNDLDYYALKQSPDGPGMTYAIFSIVANEVSPSGCSAYTYAQYSYDPYARAPFFQLSEQLIDDYTTNGGTHPAYPFLTGHGGANQVVLYGYLGLRLVADEILHIDPNLPPQIPQVTYRTFYWRGWPIQAASNYTHTTIHRATTVAPLDSAEKKYAKSAISVQVGQQANSTTYKLPADGTPLTVANRKVGSTNTIKGNIAQCQSVQSVDSYQPGQYALAAVDGAASTKWQPEFAANVSSLTVSIPSGKTSVSGFYFDWAQAPPSNATVVFHNNSVSNPTFSSFGSRKGARITHIDVKLSNPYNASSNADAIVIPSGNTTNFTFSNPVPAPRFATLFVQGNQGLDKVDVQNGNGTGATVAEWAILE

SEQ ID NO: 225 - protein, 1050 aa, Aspergillus niger
LPGKNARISASLKRHAGRDVPQTALNSTNVYQTKFSGVTWDEDHWLLTTTTPDQGHYQSRGSVANGYLGINVANIGPFFELDEPVNGDVINGWPLYSRRQSFATISGFWDRQAHTNGSNFPWLSQYGDDSVISGVPHWSGLILDLGDDTYLDATVDNRTISNFKSTYDFKSGVLSWSYTWTPQGNKGSYAITYRLFAHKLYVNRAVVDMEITPLTNGNATVVNVLDGYAAVRTDFVASGQEEGAIFSAVRPWGVNNVTAYVYATLDGSDSVDLSSRRIVTDKPYVSTNSSSVAQAVDVMFTANETVRITKFVGGATTDYFLATQETAKAACLAGLADGYVKSLQSHVGEWATIMHDHSVDRFTDPATGKLPEDSHIVDSAIIAVTNTYYLLQNTAGTNAIVAAGGIPVNVDSCAPGGLTSDSYGGQIFWDADLWMQPGLVASHPESAQRFTNYRIALHYQAQANIETAFTGSKNQTSFSSSAAIYPWTSGRFGNCTATGPCWDYQYHLNGDIGLAMINQWVASGDTAWFKNYLFPIYDAAATLYSELVERNGSSWTLTNMTDPDEYANSINAGGYTMPLIAETLQNANKLRKQFGLEPNETWDEIAEDVLILRENGVTLEYTSMNGSAVVKQADIVLNTFPLTYESDNYTATNSLTDLDYYANKQSADGPAMTYAIFAIVASDVSPSGCSAFTYHQYSYAPYARGPWYQLSEQMIDDASINGGTHPAFPFLTGHGGANQVALYGYLGLRLHPDDTIYIDPNLPPQIPHITYRTFYWHGWPISAWSNYTHTTIQRDSSLAPLASADLLFSNVSIKVQVGQSTASADEATIYYLPLSGALTVPNRMIGSVNTTPGNQVQCHPVYSPDAYEPGQFPISAVDGATSTKWQPSTSDLTSLTVTLSTTAEAGAEEVSGFYFDWSQAPPENLTVIFHDSPIGNPSTVFAAAGSNSTGYRVITSMSNIVQSKPYNAISAEELNVVSIPTANTTTITLDAPVQKARYATLLIAGNQANETAGATVAEWVILGQNSTSSSSAQAKRKMSARSKATLAQLS

SEQ ID NO: 226 - protein, 1056 aa, Trichoderma reesei
TTLVDRVTKCLSRHDGSDAESHFSKNVYKTDFAGVTWDEDNWLLSTTQLKQGAFEARGSVANGYLGINVASVGPFFEVDTEEDGDVISGWPLFSRRQSFATVAGFWDAQPQMNGTNFPWLSQYGSDTAISGIPHWSGLVLDLGGGTYLDATVSNKTISHFRSTYDYKAGVLSWSYKWTPKGNKGSFDISYRLFANKLHVNQAVVDMQVTASKNVQASIVNVLDGFAAVRTDFVESGEDGSAIFAAVRPNGVANVTAYVYADITGSGGVNLSSRKIVHNKPYVHANASSIAQAVPVKFAAGRTVRVTKFVGAASSDAFKNPKQVAKKAAAAGLSNGYTKSLKAHVEEWATVMPESSVDSFADPKTGKLPADSHIVDSAIIAVTNTYYLLQNTVGKNGIKAVDGAPVNVDSISVGGLTSDSYAGQIFWDADLWMQPGLVAAHPEAAERITNYRLARYGQAKENVKTAYAGSQNETFFSASAAVFPWTSGRYGNCTATGPCWDYEYHLNGDIGISLVNQWVVNGDTKDFEKNLFPVYDSVAQLYGNLLRPNKTSWTLTNMTDPDEYANHVDAGGYTMPLIAETLQKANSFRQQFGIEQNKTWNDMASNVLVLRENGVTLEFTAMNGTAVVKQADVIMLTYPLSYGTNYSAQDALNDLDYYANKQSPDGPAMTYAFFSIVANEISPSGCSAYTYAQNAFKPYVRAPFYQISEQLIDDASVNGGTHPAYPFLTGHGGAHQVVLFGYLGLRLVPDDVIHIEPNLPPQIPYLRYRTFYWRGWPISAWSNYTHTTLSRAAGVAALEGADQRFARKPITIHAGPEQDPTAYRLPVKGSVVIPNKQIGSQQTYAGNLVQCHAASSPNDYVPGQFPIAAVDGATSTKWQPASADKVSSITVSLDKEDVGSLVSGFHFDWAQAPPVNATVIFHDEALADPATALASAHKHNSKYTTVTSLTNIELSDPYVSTKDLNAIAIPIGNTTNVTLSHPVAASRYASLLIVGNQGLDPVDVKAKNGTGATVAEWAIFGHGKEHSGKPSSHSKRRLNVRTAATLSNPRSFMRRRL

SEQ ID NO: 227 - protein, 19 aa, Saccharomyces cerevisiae
MLSLKTLLCTLLTVSSVLA

SEQ ID NO: 228 - DNA, 185 bp, Saccharomyces cerevisiae
agtgcttttaactaagaattattagtcttttctgcttattttttcatcatagtttagaacactttatattaacgaatagtttatgaatctatttaggtttaaaaattgatacagttttataagttactttttcaaagactcgtgctgtctattgcataatgcactggaaggggaaaaaaaaggtg

SEQ ID NO: 229 - protein, 555 aa, Pycnoporus sanguineus glucoamylase
QSSAVDAYVASESPIAKQGVLNNIGPNGSKAHGAKAGIVVASPSTENPDYLYTWTRDSSLVFKLLIDQFTSGDDTSLRGLIDDFTSAEAILQQVSNPSGTVSTGGLGEPKFNIDETAFTGAWGRPQRDGPALRATSIIRYANWLLDNGNTTYVSNTLWPVIQLDLDYVADNWNQSTFDLWEEVDSSSFFTTAVQHRALREGATFASRIGQSSVVSGYTTQADNLLCFLQSYWNPSGGYVTANTGGGRSGKDSNTVLTSIHTFDPAAGCDAATFQPCSDKALSNLKVYVDAFRSIYTINNGIASNAAVATGRYPEDSYMGGNPWYLTTSAVAEQLYDALYVWDQLGGLNVTSTSLAFFQQFASGLSTGTYSASSSTYATLTSAIRSFADGFLAINAKYTPADGGLAEQYSRNDGTPLSAVDLTWSYAAALTAFAAREGKTYGSWGAAGLTVPASCSGGGGATVAVTFNVQATTVFGENIYITGSVAALQNWSPDNALILSAANYPTWSITVNLPANTVVQYKYIRKFNGQVTWESDPNNQITTPSGGSFTQNDVWR

SEQ ID NO: 230 - protein, 599 aa, Trichoderma reesei
SVDDFISTETPIALNNLLCNVGPDGCRAFGTSAGAVIASPSTIDPDYYYMWTRDSALVFKNLIDRFTETYDAGLQRRIEQYITAQVTLQGLSNPSGSLADGSGLGEPKFELTLKPFTGNWGRPQRDGPALRAIALIGYSKWLINNNYQSTVSNVIWPIVRNDLNYVAQYWNQTGFDLWEEVNGSSFFTVANQHRALVEGATLAATLGQSGSAYSSVAPQVLCFLQRFWVSSGGYVDSNINTNEGRTGKDVNSVLTSIHTFDPNLGCDAGTFQPCSDKALSNLKVVVDSFRSIYGVNKGIPAGAAVAIGRYAEDVYYNGNPWYLATFAAAEQLYDAIYVWKKTGSITVTATSLAFFQELVPGVTAGTYSSSSSTFTNIINAVSTYADGFLSEAAKYVPADGSLAEQFDRNSGTPLSAVHLTWSYASFLTAAARRAGIVPPSWANSSASTIPSTCSGASVVGSYSRPTATSFPPSQTPKPGVPSGTPYTPLPCATPTSVAVTFHELVSTQFGHTVKVAGNAAALGNWSTSAAVALDAVNYRDNHPLWIGTVNLEAGDVVEYKYIIVGQDGSVTWESDPNHTYTVPAVACVTQVVKEDTWQS

SEQ ID NO: 231 - protein, 633 aa, Bacillus amyloliquefaciens
GPAAANAETANKSNKVTASSVKNGTILHAWNWSFNTLTQNMKDIRDAGYAAIQTSPINQVKEGNQGDKSMRNWYWLYQPTSYQIGNRYLGTEQEFKDMCAAAEKYGVKVIVDAVINHTTSDYGAISDEIKRIPNWTHGNTQIKNWSDRWDVTQNSLLGLYDWNTQNTEVQVYLKRFLERALNDGADGFRYDAAKHIELPDDGNYGSQFWPNITNTSAEFQYGEILQDSASRDTAYANYMNVTASNYGHSIRSALKNRNLSVSNISHYASDVSADKLVTWVESHDTYANDDEESTWMSDDDIRLGWAVIGSRSGSTPLFFSRPEGGGNGVRFPGKSQIGDRGSALFKDQAITAVNTFHNVMAGQPEELSNPNGNNQVFMNQRGSKGVVLANAGSSSVTINTSAKLPDGRYDNRAGAGSFQVANGKLTGTINARSAAVLYPDDIGNAPHVFLENYQTGAVHSFNDQLTVTLRANAKTTKAVYQINNGQQTAFKDGDRLTIGKGDPIGTTYNIKLTGTNGEGAARTQEYTFVKKDPSQTNIIGYQNPDHWGQVNAYIYKHDGGRAIELTGSWPGKAMTKNANGMYTLTLPENTDTANAKVIFNNGSAQVPGQNQPGFDYVQNGLYNNSGLNGYLPH

SEQ ID NO: 232 - DNA, 700 bp, Saccharomyces cerevisiae
cacccatgaaccacacggttagtccaaaaggggcagttcagattccagatgcgggaattagcttgctgccaccctcacctcactaacgctgcggtgtgcggatacttcatgctatttatagacgcgcgtgtcggaatcagcacgcgcaagaaccaaatgggaaaatcggaatgggtccagaactgctttgagtgctggctattggcgtctgatttccgttttgggaatcctttgccgcgcgcccctctcaaaactccgcacaagtcccagaaagcgggaaagaaataaaacgccaccaaaaaaaaaaaaataaaagccaatcctcgaagcgtgggtggtaggccctggattatcccgtacaagtatttctcaggagtaaaaaaaccgtttgttttggaatttcccatttcgcggccacctacgccgctatctttgcaacaactatctgcgataactcagcaaattttgcatattcgtgttgcagtattgcgataatgggagtcttacttccaacataacggcagaaagaaatgtgagaaaattttgcatcctttgcctccgttcaagtatataaagtcggcatgcttgataatctttctttccatcctacattgttctaattattcttattctcctttattctttcctaacataccaagaaattaatcttctgtcattcgcttaaacactatatcaataa

SEQ ID NO: 233 - DNA, 240 bp, Saccharomyces cerevisiae
tcagtactgacaataaaaagattcttgttttcaagaacttgtcatttgtatagtttttttatattgtagttgttctattttaatcaaatgttagcgtgatttatattttttttcgcctcgacatcatctgcccagatgcgaagttaagtgcgcagaaagtaatatcatgcgtcaatcgtatgtgaatgctggtcgctatactgctgtcgattcgatactaacgccgccatccagtgtcga

SEQ ID NO: 234 - protein, 18 aa, Saccharomyces cerevisiae
MQLLRCFSIFSVIASVLA

SEQ ID NO: 235 - protein, 274 aa, Thermomyces lanuginosus
EVSQDLFNQFNLFAQYSAAAYCGKNNDAPAGTNITCTGNACPEVEKADATFLYSFEDSGVGDVTGFLALDNTNKLIVLSFRGSRSIENWIANLNFWLKKINDICSGCRGHDGFTSSWRSVADTLRQKVEDAVREHPDYRVVFTGHSLGGALATVAGADLRGNGYDIDVFSYGAPRVGNRAFAEFLTVQTGGTLYRITHTNDIVPRLPPREFGYSHSSPEYWIKSGTLVPVTRNDIVKIEGIDATGGNNQPNIPDIPAHLWYFQATDACNAGGFS

SEQ ID NO: 236 - protein, 277 aa, Thermomyces lanuginosus
APAPVLRRDVSSSVLSELDLFAQYSAAAYCSSNIGSPGTKLTCSVGNCPRVEAADTETLIEFNESSSFGDVTGYIAVDRTNSLLVLAFRGSSTVSNWEADLDFPLTDASSLCSGCEIHSGFWAAWQTVQASITSTLESAIASYPGYTLVFTGHSYGAALAAIAATTLRNAGYTIQLYDYGQPRLGNLALAQYITAQTQGANYRVTHTDDIVPKLPPELFGYHHFSPEYWITSGDNVTVTTSDVQVVTGIDSTAGNDGTLLDSTSAHDWYIVYIDGCD

SEQ ID NO: 237 - protein, 594 aa, Penicillium emersonii
SAPYDKRDLAQEIWDDIKNAVDCAGCQVVLTALKGVADLGTTALVDVLTEVCNISGKEDSDVCSGIISREGPVLDYVLQHLDIGSHTSQVICASAFGLCQYPEVRPYNLTFPKPKPNTTRPEPSGESPIQVVHFSDTHVDLSYETGSNYNCTKPICCRPYTAEDAPGNTTTPCGPYGNTKCDAPLSLEESMFAAIKALNPQPAFSIYTGDVVAHDIWLVDQNEVIEDLNATYDRMAGLGLVYAAIGNHDTAPVNDLPTSNIPSEYSANWTYEALSYDFTMLTQSASAQTAANYGSYSAIYPGSYGTDLRVISYNSIFYYVDNFWAYQDPMEFDPDGQLAWLINELQEAETAGQRVWIIAHVPTGTSDHFHDYSHYFDQIVQRYEATIAALFYGHTHIDQFQISYSNYSNRAFDTATAIGYIMPSLTPTSGPPTFRVYDVDPKTFAVLDFTNYIANISDPAFQSGPSWQKYYSAKETYGSLLSPPVTDPTAELTPAFWHNVTVAFEQDNATFQEYWARQTRGYDVSSCTGSCITQAICGLRAGDAQYNCVTPTPGFNFAKRDTSNPKQALSHVEKCEGSGLLGLLRRMVADSKSS

SEQ ID NO: 238 - protein, 259 aa, Bacillus thuringiensis
HENDGGSKIKIIHRWSAEDKHKEGVNSHLWIVNRAIDIMSRNTTLVKQDRVAQLNEWRTELENGIYAADYENPYYDNSTFASHFYDPDNGKTYIPFAKQAKETGAKYFKLAGESYKNKDMKQAFFYLGLSLHYLGDVNQPMHAANFTNLSYPQGFHSKYENFVDTIKDNYKVTDGNGYWNWKGTNPEDWIHGAAVVAKQDYSGIVNDNTKDWFVKAAVSQEYADKWRAEVTPMTGKRLMDAQRVTAGYIQLWFDTYGDR

SEQ ID NO: 239 - protein, 297 aa, Pseudomonas sp.
QESPAFIDPASWNTPFNGIAQVACHNCYEKQYANTFSSVLDSVRTLELDFWDQRDAVSGGSPHHWFVRHNPGTLFQSGNDNNCTGDGTGKNDLEACLNDVKNWSDKHPGHFPITLILDKKQGWSKESSGRTPKDFDELVARVFQGKLFTPQDLATHIGSGAGALQGNLKGKSWPTANDLQGKVLLVLNHSENQKLSQYAEARTSKAKVFISPVTNGQNDISGKVSGMSSQSSGYVAMNNMGKGDKSWAKQAFAYSHIGRVWGDDEVSFAQHINQKINLSAYYRFAAQSAGGYRIRPF

SEQ ID NO: 240 - protein, 625 aa, Kionochaeta sp.
AVNPADVLSVVEKRVDPASGLEVRSIWDTIWNDIKSAADCTACEAVLTLLKGVAAFGDNFFVEVLTEICDLSGAEDDDVCSGVLSLEGPIIANDIRKMSIGSKTSELFCITFLGLCSYPAVDAFTVPFPTAKSAATRPVSSGKDPIYVVHYSDIHIDPFYVAGSASNCTKPICCRDYTSASSPGNNNSPAGPYGDHNCDVPISLEDSMYAAIKKLVPDAAFGIFTGDIVDHAVWNTSESQNIIDMNDAYTRMKNSGMLPTIFATAGNHEASPVNSFPPPAIGNESQWVYDTLASDWSQWIGTSGASSVESIGAYSVQYGSTKLRVISLNTNMYYIENFYLYEPTMEQDPAGQFAWLVSELSAAEAAGERVWIIGHMPLGLSDAFHDPSNYFDQIVNRYEATIAAMFFGHTHEDHFQISYSDYNARTAANARAVSYIMPSLTPTSGHPTFRVYTVDPETFGVLDATTYYADMSQPTYQTAGPAWSVYYSAKAAYGGLVDPPVAADDAAAELTPAFWHNVTAALAADPASFDAYYARKTRGWDVAACAGACAAAEVCALRAARAQDNCVVPTPGVHFSKRADEGTLAHHRDECGVSVARNSLSSLVVQREALEHLEGRLSEKRRMAV

SEQ ID NO: 241 - protein, 613 aa, Mariannaea pinicola
QEVTHDLAGIKRSLESRDWVEDLWDKFESDATCAGCESLVLVLKGLAAISDQAFIDVLQEICKISGAEDDDVCDGSIQLEGPVIASGLRSMAIGSRTSKEFCTTFLGLCAYPAVQQWSVPFSSSKSSKTRPSSSGKDPIKVVHYSDIHIDPLYVGGSNSNCTKPICCRSYTKADQPGNNKYPAGPNGDHNCDSPVSLEKSMYNAIKEIVPDAAFTIFTGDIVDHAVWNTSQSYNTEQITNAYGLMSDNLGTIYGTAGNHEAHPANAFQPNSVGNVSQWVYDLLSGLWSQWISTEAKADSEKLGAYSTKYPGGNLRIISLNTNMYYRENYWLYRKTMIQDPSNQISWLVNELEAAETAGERVYIIGHMPLGDSNSFHDQSNYLDQVINRYSATISAMFFGHTHDDQFQISYSNWSNRNFSNALVTSYIGPSLTPTAGMPAFRVYDVDPVTFGILDSTTYIADMTDSAFQTTGPVWKKYYSAKEVYGSLLSPAVTDSSAELTAAFWHNVTTLFEADNTAFEAFLSRKSRGWKSESCTGTCKANEICQLRAARSENNCYTPSLGISFNKRSLNPVEERDECGISVTRATVSAMGVRKDVLRLLKKRFIEKAGEVRG

SEQ ID NO: 242 - protein, 259 aa, Fictibacillus macauensis
HENEGGNKVRVIQYWSAEDPHHEDTNTHLWIVRHAMEIMANNKDVVKPGEVEQLKQWQSDLEQGIYDADHANPYYDNATFASHFYDPDTGKSYIPLAAHAKTTSVKYFKRAGEAYQKGDHKQAFYNLGLALHYIGDLNQPMHAANFTNLSYPQGFHSKYENYVDSFKEDYAVKDGEGYWHWKGTNPEDWLHGTAVAAKKDYPDIVNDTTKAWFVKAAVSNSYAAKWRAAVVPATGKRLTEAQRILAGYMQLWFDTYVNK

SEQ ID NO: 243 - DNA, 250 bp, Saccharomyces cerevisiae
acagaagacgggagacactagcacacaactttaccaggcaaggtatttgacgctagcatgtgtccaattcagtgtcatttatgattttttgtagtaggatataaatatatacagcgctccaaatagtgcggttgccccaaaaacaccacggaacctcatctgttctcgtactttgttgtgacaaagtagctcactgccttattatcacattttcattatgcaacgcttcggaaaatacgatgttgaaaat

SEQ ID NO: 244 - protein, 561 aa, Punctularia strigosozonata
SSKSVSAYISSESPIAHSKLLDNIGPDGAKAPGAFPGVVVASPSTDNPNYYYSWIRDSSLVFKTLIDDYVNGKNTSKSLRSLIDDFVTASSVFQQTPNPSGNVSTGGLGEPKFYVNETAFLDSWGRPQRDGPALRSTALITYANYLLDNDNTTWVKDTLWPIIELDVNYVSDFWNYTTFDLWEEVASSSFFTTAVQHRALRQASKLAKTLDKTDNIDSWNTQADNVLCFLQSYWNGSAIIANTGGGRSGIDANTVLASIHTFDSSAGCDATTFQPCSDKALSNLKVYVDAFRSIYEINSGIDPNAAVATGRYPEDVFYDGNPWYLATAAVAEQLYDALYVWNTTGSLEITDISLPFFQQFDSDVKTGTYSDDDTFDSLISSIQSFADGFLEIHAKYTPDDGALSEEFSKTDGSQTSAADLTWSYAAALTAFDARSRDAAVKWGAKGLQVPDGTCKTNEGGDDGLGVPVTFLVKDAETVEGQSVYITGSIATLKSWSPDDALLMSPSDYPTWTLTVNLSASESVQYKYIKKDTAGTVIWESDPNNSLLVPSGGSVTTDDTWR

SEQ ID NO: 245 - protein, 551 aa, Fibroporia radiculosa
QSTSVSAYIASESPVAKAGVLANIGTEGSLSSGAYSGVVIASPSTVNPDYLYTWVRDSSLTFQALIDQYVYGEDPTLRSLIDEFITAESILQQTTNPSGTVSTGGLGEPKFNINETAFTGPWGRPQRDGPALRSTAIITYATYLWNSGNTSYVSDSLWPIIELDLNYIATYWNFSTFDLWEEIDSSSFWTTAVQHRALRQGITFANLIGQTSPVSNYETQAGDILCFLQTYWNPTGNYMTANTGGGRSGKDSNTVLASVHTFDPDAGCDSTTFQPCSDKALSNLKVYVDSFRSLYAINDGIASDAAVATGRYPEDVYYGGNPWYLCTFAVAEQLYDALIVWSSQGYLEITDLSLAFFQQFDSDVGTGTYDSGSSTYSTLTSAIRTFADGFVLTNAKYTPTNGSLSEEYTSADGTPISAYDLTWSYASALTVFAAEAGTTYGSWGAAGLTVPSTCTSGVAVTFEVDYDTEYGENVYITGSVNALENWSATNALIMSAADYPTWSITVYLPPSTTIQYKYLTQYNGEVTWEDDPNNEITTPASGSMTQVDSWH

SEQ ID NO: 246 - protein, 552 aa, Wolfiporia cocos
QTTSVTSYIASESPIAKAGVLANIGADGSLSSGAYSGIVIASPSTVNPNYLYTWTRDSSLTFMELINQYIYGEDDTLRTLIDEFVSAEATLQQVTNPSGTVSTGGLGEPKFNINETAFTGPWGRPQRDGPALRATAIMAYATYLYENGNTSYVTDTLWPIIELDLGYVAEYWNESTFDLWEEIDSSSFFTTAVQHRALRAGVTFANLIGETSDVSNYQENADDLLCFLQSYWNPTGSYVTANTGGGRSGKDANTLLASIHTFDPDAGCNATTFQPCSDKALSNHKVYVDSFRSLYAINDDISSDAAVATGRYPEDVYYNGNPWYLCTLAAAEQLYDSLIVWKAQGYIEVTSLSLAFFQQFDASVSAGTYDSSSDTYTTLLDAVQTYADGFVLMVAQYTPANGSLSEQYAKADGSPTSAYDLTWSFAAALTAFAARDGKTYGSWGAADLSSTCSGSTDTVAVTFEVQYDTQYGENLYITGSVSQLEDWSADDALIMSSADYPTWSITVDLPPSTLIQYKYLTKYNGDVTWEDDPNNEITTPASGSYTQVDSWH

SEQ ID NO: 247 - protein, 591 aa, Talaromyces emersonii
ATGSLDSFLATETPIALQGVLNNIGPNGADVAGASAGIVVASPSRSDPNYFYSWTRDAALTAKYLVDAFNRGNKDLEQTIQQYISAQAKVQTISNPSGDLSTGGLGEPKFNVNETAFTGPWGRPQRDGPALRATALIAYANYLIDNGEASTADEIIWPIVQNDLSYITQYWNSSTFDLWEEVEGSSFFTTAVQHRALVEGNALATRLNHTCSNCVSQAPQVLCFLQSYWTGSYVLANFGGSGRSGKDVNSILGSIHTFDPAGGCDDSTFQPCSARALANHKVVTDSFRSIYAINSGIAEGSAVAVGRYPEDVYQGGNPWYLATAAAAEQLYDAIYQWKKIGSISITDVSLPFFQDIYPSAAVGTYNSGSTTFNDIISAVQTYGDGYLSIVEKYTPSDGSLTEQFSRTDGTPLSASALTWSYASLLTASARRQSVVPASWGESSASSVLAVCSATSATGPYSTATNTVWPSSGSGSSTTTSSAPCTTPTSVAVTFDEIVSTSYGETIYLAGSIPELGNWSTASAIPLRADAYTNSNPLWYVTVNLPPGTSFEYKFFKNQTDGTIVWEDDPNRSYTVPAYCGQTTAILDDSWQ

SEQ ID NO: 248 - protein, 578 aa, Rhizopus microsporus
VPTSAAVQVESYNYDGTTFSGRIFVKNIAYSKVVTVIYSDGSDNWNNNNNKVSAAYSEAISGSNYEYWTFSAKLSGIKQFYVKYEVSGSTYYDNNGTKNYQVQATSATSTTATATTTTATGTTTTSTGPTSTASVSFPTGNSTISSWIKNQEEISRFAMLRNINPPGSATGFIAASLSTAGPDYYYSWTRDSALTANVIAYEYNTTFTGNTTLLKYLKDYVTFSVKSQSVSTVCNCLGEPKFNADGSSFTGPWGRPQNDGPAERAVTFMLIADSYLTQTKDASYVTGTLKPAIFKDLDYVVSVWSNGCYDLWEEVNGVHFYTLMVMRKGLILGADFAARNGDSSRASTYKQTASTMESKISSFWSDSNNYVQVSQSVTAGVSKKGLDVSTLLAANIGSLPDGFFTPGSEKILATAVALENAFASLYPINSNLPSYLGNSIGRYPEDTYNGNGNSQGNPWFLAVNAYAELYYRAIKEWISNGKVTVSNISLPFFKKFDSSATSGKTYTAGTSDFNNLAQNIALGADRFLSTVKFHAYTNGSLSEEYDRSTGMSTGARDLTWSHASLITVAYAKAGSPAA

SEQ ID NO: 249 - protein, 579 aa, Rhizopus delemar
ASIPSSASVQLDSYNYDGSTFSGKIYVKNIAYSKKVTVIYADGSDNWNNNGNTIAASYSAPISGSNYEYWTFSASINGIKEFYIKYEVSGKTYYDNNNSANYQVSTSKPTTTTATATTTTAPSTSTTTPPSSSEPATFPTGNSTISSWIKKQEGISRFAMLRNINPPGSATGFIAASLSTAGPDYYYAWTRDAALTSNVIVYEYNTTLSGNKTILNVLKDYVTFSVKTQSTSTVCNCLGEPKFNPDGSGYTGAWGRPQNDGPAERATTFILFADSYLTQTKDASYVTGTLKPAIFKDLDYVVNVWSNGCFDLWEEVNGVHFYTLMVMRKGLLLGADFAKRNGDSTRASTYSSTASTIANKISSFWVSSNNWIQVSQSVTGGVSKKGLDVSTLLAANLGSVDDGFFTPGSEKILATAVAVEDSFASLYPINKNLPSYLGNSIGRYPEDTYNGNGNSQGNPWFLAVTGYAELYYRAIKEWIGNGGVTVSSISLPFFKKFDSSATSGKKYTVGTSDFNNLAQNIALAADRFLSTVQLHAHNNGSLAEEFDRTTGLSTGARDLTWSHASLITASYAKAGAPAA

SEQ ID NO: 250 - protein, 579 aa, Rhizopus oryzae
ASIPSSASVQLDSYNYDGSTFSGKIYVKNIAYSKKVTVVYADGSDNWNNNGNTIAASFSGPISGSNYEYWTFSASVKGIKEFYIKYEVSGKTYYDNNNSANYQVSTSKPTTTTAATTTTTAPSTSTTTRPSSSEPATFPTGNSTISSWIKKQEDISRFAMLRNINPPGSATGFIAASLSTAGPDYYYAWTRDAALTSNVIVYEYNTTLSGNKTILNVLKDYVTFSVKTQSTSTVCNCLGEPKFNPDGSGYTGAWGRPQNDGPAERATTFVLFADSYLTQTKDASYVTGTLKPAIFKDLDYVVNVWSNGCFDLWEEVNGVHFYTLMVMRKGLLLGADFAKRNGDSTRASTYSSTASTIANKISSFWVSSNNWVQVSQSVTGGVSKKGLDVSTLLAANLGSVDDGFFTPGSEKILATAVAVEDSFASLYPINKNLPSYLGNAIGRYPEDTYNGNGNSQGNPWFLAVTGYAELYYRAIKEWISNGGVTVSSISLPFFKKFDSSATSGKKYTVGTSDFNNLAQNIALAADRFLSTVQLHAPNNGSLAEEFDRTTGFSTGARDLTWSHASLITASYAKAGAPAA

SEQ ID NO: 251 - protein, 435 aa, Thermococcus gammatolerans
KYSELEQGGVIMQAFYWDVPAGGIWWDTIRQKIPEWYDAGISAIWIPPASKGMGGAYSMGYDPYDYFDLGEFYQKGTVETRFGSKEELVNMISTAHRYGIKVIADIVINHRAGGDLEWNPYVGDYTWTDFSQVASGKYKAHYMDFHPNNYSTSDEGTFGGFPDIDHLVPFNKYWLWASDESYAAYLRSIGVDAWRFDYVKGYGAWVVKDWLSWWGGWAVGEYWDTDVNALLNWAYDSGAKVFDFPLYYKMDEAFDNKNIPALVYAIQNGGTVVSRDPFKAVTFVANHDTNIIWNKYPAYAFILTYEGQPVIFYRDYEEWLNKDKLNNLIWIHEHLAGGSTKILYYDDDELIFMREGYGDRPGLITYINLGSGWAERWVNVGSKFAGYTIHEYTGNLGGWVDRYVYYNGWVKLTAPPHDPANGYYGYSVWSYAGVG

SEQ ID NO: 252 - protein, 432 aa, Thermococcus thioreducens
ETLENGGVIMQAFYWDVPMGGIWWDTIAQKIPDWASAGISAIWIPPASKGMSGGYSMGYDPYDYFDLGEYYQKGTVETRFGSKQELVNMINTAHAYGMKVIADIVINHRAGGDLEWNPFVNDYTWTDFSKVASGKYTANYLDFHPNELHAGDSGTFGGYPDICHDKSWDQYWLWASNESYAAYLRSIGIDAWRFDYVKGYAPWVVKDWLNWWGGWAVGEYWDTNVDALLNWAYASGAKVFDFPLYYKMDEAFDNNNIPALVDALRYGQTVVSRDPFKAVTFVANHDTDIIWNKYPAYAFILTYEGQPMIFYRDYEEWLNKDRLKNLIWIHDHLAGGSTDIVYYDSDELIFVRNGYGSKPGLITYINLGSSKAGRWVYVPKFAGSCIHEYTGNLGGWVDKWVDSSGWVYLEAPAHDPANGQYGYSVWSYCGVG

SEQ ID NO: 253 - protein, 440 aa, Thermococcus eurythermalis
QPAGAAKYLELEEGGVIMQAFYWDVPSGGIWWDTIRQKIPEWYDAGISAIWIPPASKGMGGAYSMGYDPYDFFDLGEYDQKGTVETRFGSKQELVNMINTAHAYGIKVIADIVINHRAGGDLEWNPFVNDYTWTDFSKVASGKYTANYLDFHPNEVKCCDEGTFGGFPDIAHEKSWDQYWLWASNESYAAYLRSIGVDAWRFDYVKGYGAWVVKDWLDWWGGWAVGEYWDTNVDALLNWAYSSDAKVFDFPLYYKMDAAFDNKNIPALVEALKNGGTVVSRDPFKAVTFVANHDTDIIWNKYPAYAFILTYEGQPTIFYRDYEEWLNKDRLKNLIWIHDHLAGGSTDIVYYDNDELIFVRNGYGDKPGLITYINLGSSKAGRWVYVPKFAGACIHEYTGNLGGWVDKWVDSSGWVYLEAPAHDPANGYYGYSVWSYCGVG

SEQ ID NO: 254 - protein, 432 aa, Thermococcus hydrothermalis
ETLENGGVIMQAFYWDVPGGGIWWDTIAQKIPDWASAGISAIWIPPASKGMSGGYSMGYDPYDFFDLGEYYQKGSVETRFGSKEELVNMINTAHAHNMKVIADIVINHRAGGDLEWNPFTNSYTWTDFSKVASGKYTANYLDFHPNELHAGDSGTFGGYPDICHDKSWDQHWLWASNESYAAYLRSIGIDAWRFDYVKGYAPWVVKNWLNRWGGWAVGEYWDTNVDALLSWAYDSGAKVFDFPLYYKMDEAFDNNNIPALVDALKNGGTVVSRDPFKAVTFVANHDTNIIWNKYPAYAFILTYEGQPAIFYRDYEEWLNKDRLRNLIWIHDHLAGGSTDIIYYDSDELIFVRNGYGDKPGLITYINLGSSKAGRWVYVPKFAGSCIHEYTGNLGGWIDKWVDSSGRVYLEAPAHDPANGQYGYSVWSYCGVG

SEQ ID NO: 255 - protein, 434 aa, Pyrococcus furiosus
KYLELEEGGVIMQAFYWDVPGGGIWWDHIRSKIPEWYEAGISAIWLPPPSKGMSGGYSMGYDPYDYFDLGEYYQKGTVETRFGSKEELVRLIQTAHAYGIKVIADVVINHRAGGDLEWNPFVGDYTWTDFSKVASGKYTANYLDFHPNELHCCDEGTFGGFPDICHHKEWDQYWLWKSNESYAAYLRSIGFDGWRFDYVKGYGAWVVRDWLNWWGGWAVGEYWDTNVDALLSWAYESGAKVFDFPLYYKMDEAFDNNNIPALVYALQNGQTVVSRDPFKAVTFVANHDTDIIWNKYPAYAFILTYEGQPVIFYRDFEEWLNKDKLINLIWIHDHLAGGSTTIVYYDNDELIFVRNGDSRRPGLITYINLSPNWVGRWVYVPKFAGACIHEYTGNLGGWVDKRVDSSGWVYLEAPPHDPANGYYGYSVWSYCGVG

SEQ ID NO: 256 - protein, 626 aa, Bacillus amyloliquefaciens
ETANKSNKVTASSVKNGTILHAWNWSFNTLTQNMKDIRDAGYAAIQTSPINQVKEGNQGDKSMRNWYWLYQPTSYQIGNRYLGTEQEFKDMCAAAEKYGVKVIVDAVINHTTSDYGAISDEIKRIPNWTHGNTQIKNWSDRWDVTQNSLLGLYDWNTQNTEVQAYLKRFLERALNDGADGFRYDAAKHIELPDDGNYGSQFWPNITNTSAEFQYGEILQDSASRDTAYANYMNVTASNYGHSIRSALKNRNLSVSNISHYASDVSADKLVTWVESHDTYANDDEESTWMSDDDIRLGWAVIGSRSGSTPLFFSRPEGGGNGVRFPGKSQIGDRGSALFKDQAITAVNTFHNVMAGQPEELSNPNGNNQIFMNQRGSKGVVLANAGSSSVTINTSAKLPDGRYDNRAGAGSFQVANGKLTGTINARSAAVLYPDDIGNAPHVFLENYQTGAVHSFNDQLTVTLRANAKTTKAVYQINNGQQTAFKDGDRLTIGKGDPIGTTYNIKLTGTNGEGAARTQEYKFVKKDPSQTNIIGYQNPDHWGQVNAYIYKHDGGRAIELTGSWPGKAMTKNADGMYTLTLPENADTANAKVIFNNGSAQVPGQNQPGFDYVQNGLYNNSGLNGYLPH

SEQ ID NO: 257 - protein, 250 aa, Saccharomyces cerevisiae
MPLTTKPLSLKINAALFDVDGTIIISQPAIAAFWRDFGKDKPYFDAEHVIHISHGWRTYDAIAKFAPDFADEEYVNKLEGEIPEKYGEHSIEVPGAVKLCNALNALPKEKWAVATSGTRDMAKKWFDILKIKRPEYFITANDVKQGKPHPEPYLKGRNGLGFPINEQDPSKSKVVVFEDAPAGIAAGKAAGCKIVGIATTFDLDFLKEKGCDIIVKNHESIRVGEYNAETDEVELIFDDYLYAKDDLLKW

SEQ ID NO: 258 - protein, 250 aa, Saccharomyces cerevisiae
MGLTTKPLSLKVNAALFDVDGTIIISQPAIAAFWRDFGKDKPYFDAEHVIQVSHGWRTFDAIAKFAPDFANEEYVNKLEAEIPVKYGEKSIEVPGAVKLCNALNALPKEKWAVATSGTRDMAQKWFEHLGIRRPKYFITANDVKQGKPHPEPYLKGRNGLGYPINEQDPSKSKVVVFEDAPAGIAAGKAAGCKIIGIATTFDLDFLKEKGCDIIVKNHESIRVGGYNAETDEVEFIFDDYLYAKDDLLKW

SEQ ID NO: 259 - protein, 391 aa, Saccharomyces cerevisiae
MSAAADRLNLTSGHLNAGRKRSSSSVSLKAAEKPFKVTVIGSGNWGTTIAKVVAENCKGYPEVFAPIVQMWVFEEEINGEKLTEIINTRHQNVKYLPGITLPDNLVANPDLIDSVKDVDIIVFNIPHQFLPRICSQLKGHVDSHVRAISCLKGFEVGAKGVQLLSSYITEELGIQCGALSGANIATEVAQEHWSETTVAYHIPKDFRGEGKDVDHKVLKALFHRPYFHVSVIEDVAGISICGALKNVVALGCGFVEGLGWGNNASAAIQRVGLGEIIRFGQMFFPESREETYYQESAGVADLITTCAGGRNVKVARLMATSGKDAWECEKELLNGQSAQGLITCKEVHEWLETCGSVEDFPLFEAVYQIVYNNYPMKNLPDMIEELDLHED

SEQ ID NO: 260 - protein, 440 aa, Saccharomyces cerevisiae
MLAVRRLTRYTFLKRTHPVLYTRRAYKILPSRSTFLRRSLLQTQLHSKMTAHTNIKQHKHCHEDHPIRRSDSAVSIVHLKRAPFKVTVIGSGNWGTTIAKVIAENTELHSHIFEPEVRMWVFDEKIGDENLTDIINTRHQNVKYLPNIDLPHNLVADPDLLHSIKGADILVFNIPHQFLPNIVKQLQGHVAPHVRAISCLKGFELGSKGVQLLSSYVTDELGIQCGALSGANLAPEVAKEHWSETTVAYQLPKDYQGDGKDVDHKILKLLFHRPYFHVNVIDDVAGISIAGALKNVVALACGFVEGMGWGNNASAAIQRLGLGEIIKFGRMFFPESKVETYYQESAGVADLITTCSGGRNVKVATYMAKTGKSALEAEKELLNGQSAQGIITCREVHEWLQTCELTQEFPLFEAVYQIVYNNVRMEDLPEMIEELDIDDE

SEQ ID NO: 261 - DNA, 700 bp, Saccharomyces cerevisiae
cacatagactgcgtcataaaaatacactacggaaaaaccataaagagcaaagcgatacctacttggaaggaaaaggagcacgcttgtaagggggatgggggctaagaagtcattcactttcttttcccttcgcggtccggacccgggacccctcctctccccgcacgatttcttcctttcatatcttccttttattcctatcccgttgaagcaaccgcactatgactaaatggtgctggacatctccatggctgtgacttgtgtgtatctcacagtggtaacggcaccgtggctcggaaacggttccttcgtgacaattctagaacaggggctacagtctcgataatagaataataagcgcatttttgctagcgccgccgcggcgcccgtttcccaatagggaggcgcagtttatcggcggagctctacttcttcctatttgggtaagcccctttctgttttcggccagtggttgctgcaggctgcgccggagaacatagtgataagggatgtaactttcgatgagagaattagcaagcggaaaaaaactatggctagctgggagttgtttttcaatcatataaaagggagaaattgttgctcactatgtgacagtttctgggacgtcttaacttttattgcagaggactatcaaatcatacagatattgtcaaaaaaaaaaaaagactaataataaaaa

SEQ ID NO: 262 - protein, 496 aa, Triticum aestivum
MAGTGVFADVLDGEVYKYYADGEWRASASGKTVAIVNPTTRQTQYRVQACTQEEVNKVMDAAKVAQKSWARTPLWKRAELLHKAAAILKEHKTPIAESLVKEIAKPAKDAVSEVVRSGDLVSYTAEEGVRILGEGKLLVSDSFPGNERNKYCLSSKVPLGVVLAIPPFNYPVNLAVSKIGPALIAGNSLVLKPPTQGAVAALHMVHCFHLAGFPKGLISCVTGKGSEIGDFLTMHPGVNCISFTGGDTGIAISKKAGMVPLQMELGGKDACIVLEDADLDLVAANIVKGGFSYSGQRCTAVKVVLIMEAVADTVVEKVNAKLAKLKVGPPEDDSDITPVVTESSANFIEGLVMDAKEKGATFCQEYRREGNLIWPLLLDHVRPDMRIAWEEPFGPVLPVIRINSVEEGIHHCNASNFGLQGCVFTRDINKAIMISDAMESGTVQINSAPARGPDHFPFQGLKDSGIGSQGITNSINMMTKVKSTVINLPSPSYTMG

SEQ ID NO: 263 - protein, 498 aa, Chlamydomonas reinhardtii
MSAQEFYAPILASTGVYKFYIDGQWKESVSGKSVAISNPSTRQTAYQVQACTQDEVNKMFESAKVAQKAWARTPLYKRAEVLHKVASLMRQYAQPIADCLVKEVAKPSKDSLTEVVRSADLIDYTAEEGVRYLGEGQLLNSDSFPGNARNKLCLVSKVPLGVVLAIPPFNYPVNLAVSKLAPALMAGNAVVLKPPTQGAVAGIHMVQCFHAAGLPAGLLSVATGRGAEIGDFLTTHPDVNCISFTGGDTGISIAKKAGMVPLQMELGGKDVCIVCEDADLDLAAKHIIKGGFSYSGQRCTAVKLVLVAAPVADRLVAAVAAGVAKLSVGRPEDDCDITPVVSESSANFIEGLAMDAKAKGATFVTGEWRREGNLIWPVLLDHVTADMRLAWEEPFGPVLPVMRVSSVEAAVEHCNKSKYGLQGCVFTRDINAAIRISDAMETGTVQVNSAPARGPDHFPFQGFRDSGIGSQGIRNSLAMMIKTKSTVINLDKESYTLG

SEQ ID NO: 264 - protein, 496 aa, Apium graveolens
MAGSGVYADIIEGDVFKYYSDGEWKKSSSGKSVAIINPTTRMTQFKVQACTQEEVNKAMETAKKVQKQWAKTPLWKRAELLHKAAAILKEHKAAIADCLVKEIAKPAKDSVTEVVRSGDLVSYCAEEGVRLLGEGKFLVSDSFPGNERTKYCLTSKIPLGVILAIPPFNYPVNLAVSKIGPALIAGNALVLKPPTQGAVACLHMVHCFHLAGFPKGLISCITGKGSEIGDFLTMHPGVNCISFTGGDTGIAISKKAGMVPLQMELGGKDACIVLEDADLDLVASNVIKGGFSYSGQRCTAIKVILVMQSVADTLVEKVNAKVAKLTVGPPEDNSDITPVVSESSANFIEGLVKDAKEKGATFCQEYKREGNLIWPLLLDNVKPDMRIAWEEPFGPILPVIRINSAEEGIHHCNASNFGLQGCVFTRDINKAMLISDAMESGTIQINSAPARGPDHFPFQGLKDSGIGSQGITNSINMMTKIKTTVINLPSPSYTMG

SEQ ID NO: 265 - protein, 496 aa, Cicer arietinum
MAATGVLAEILDGDVFKYYADGEWQKSSSGKSVSIINPTTRKPQYKVQACSQEEVNKVMDSAKAAQKLWAKTPLWKRAELLHKAAAILKEHKAEIAECLVKEVAKPAKDAVTEVVRSGDLVSYCAEEGVRILGEGKFLVSDSFPGNERTKYCLTSKIPLGVILAIPPFNYPVNLAVSKIAPALIAGNAIVLKPPTQGAVAALHMVHCFHLAGFPKGLISCVTGKGSEIGDFLTMHPAVNCISFTGGDTGIAVSKKAGMIPLQMELGGKDACIVLEDADLDLVAANIIKGGFSYSGQRCTAVKVVLVMESVADALVEKVNAKVAKLSVGPPENDCDITPVVSESSANFIEGLVLDAKQKGATFCQEYKREGNLIWPLLLDNVKPDMRIAWEEPFGPVLPVIRINSVEEGIHHCNASNFGLQGCVFTKDVNKAILISDAMETGTVQINSAPARGPDHFPFQGIKDSGIGSQGITNSINMMTKTKTTVINLPSPSYTMG

SEQ ID NO: 266 - protein, 479 aa, Bacillus pseudomycoides
MTTSNTYKFYLDGEWRESSSGQTIDIPSPYLHEVIGKVQAITREEVDEAIKSAQQAQKEWAEASLQDRAKYLYKWADELVNMQDEIADIVMKEVGKGYKDAKKEVVRTADLIRYTVDEALHMHGESMMGDSFPGGSKSKLAIIQRAPRGVVLAIAPFNYPVNLSAAKLAPALIMGNAVIFKPATQGVISGIKMVEALHKAGLPKGLVNVATGRGSVIGDYLVEHPGVNMVSFTGGTHTGAHLAKKAAMIPLVLELGGKDPGIVREDADLGEAAKHIVSGAFSYSGQRCTAIKRVLVHENVADELVSLLKDQVAELTVGSPEQDSTIVPLIDDKSADFVQGLVDDAVEKGATIVIGNKRERNLIYPTLIDNVTEDMKVAWEEPFGPILPIIRVSSDEQAIEIANKSDFGLQASVFTKDINKAFAIANKIDTGSVQINGRTERGPDHFPFIGVKGSGMGAQGIRKSLESMTREKVTVLNLV

SEQ ID NO: 267 - protein, 476 aa, Streptococcus equinus
MTKQYKNYVNGEWKLSKEEIKIYAPATGEELGSVPAMSQEEVDYVYASAKAAQKAWRALSYVERAEYLHKAADILMRDAEKIGAVLSKEIAKGYKSAVGEVIRTAEIINYAAEEGVRLEGEVLEGGSFDPASKKKIAIVRREPVGLVLAISPFNYPINLAGSKIAPALISGNVVALKPPTQGSISGLLLAEAFAEAGLPAGVFNTITGRGSVIGDYIVEHEAVNYINFTGSTPVGEHIGHLAGMRPIMLELGGKDSAIILEDADLDLAAKNIVAGAYGYSGQRCTAVKRVLVMDSIADKLVEKVSALVNNLTVGMPEDNADITPLIDTKAADYVEGLIKDAQEKGAKEVISFKREGNLISPVLFDNVTTDMRLAWEEPFGPVLPFIRVNSVEEAIEISNKSEYGLQASVFTNNFPLAFKIAEQLEVGTVHINNKTQRGTDNFPFLGAKKSGAGVQGVKYSIEAMTTVKSTVFDIAK

SEQ ID NO: 268 - protein, 497 aa, Glycine soja
MAAGTGLFAEILDGDVYKYYADGEWKKSASGKSVAIINPTTRKTQYKVQACSQEEVNKVMDLAKSAQKLWAKTPLWKRAELLHKAAAILKEHKAPIAECLVKEIAKPAKDAVTEVVRSGDLVSYTAEEGVRILGEGKFLVSDSFPGNERTKYCLTSKIPLGVILAIPPFNYPVNLAVSKIAPALIAGNSIVLKPPTQGAVSALHMVHCFHLAGFPKGLINCVTGKGSEIGDFLTMHPGVNCISFTGGDTGIAISKKAGMIPLQMELGGKDACIVLEDADLDLVAANIIKGGFSYSGQRCTAVKVVLVMESAADALVEKVKAKVAKLTVGPPEDDCDITPVVSESSANFIEGLVLDAKEKGATFCQEYKREGNLIWPLLLDNVRPDMRIAWEEPFGPVLPVIRINSVEEGIHHCNASNFGLQGCVFTKDVNKAIMISDAMETGTVQINSAPARGPDHFPFQGIKDSGIGSQGITNSINMMTKVKTTVINLPSPSYTMG

SEQ ID NO: 269 - protein, 475 aa, Streptococcus sp. DD12
MTKDYKNYVNGEWKGSESKIEIFEPANGELLGTVPAMSQADVDEVMAAAKAALPAWRALSYTERAAYLHKAADILERDAEKIGAVLSKEIAKGYKSAVGEVVRTAEIIHFAAEEGLRMEGEVLEGGAFDAGSKKKIAIVRREPVGLVLAISPFNYPVNLAGSKIAPALIAGDVVAFKPPTQGSISGLLLAEAFVEAGIPAGVLNTITGRGSVIGDYIVEHKAVDFINFTGSTPVGENIGRLAGMRPIMLELGGKDAAIVLEDADLDLTAKNIVAGAFDYSGQRCTAIKRVLVMDSVADELVEKVTALVANITVGMPEDSASVTPLIDTKAADFVQGLIDDAAEKGATAKTELKREGNLIYPTVFDHVTTDMRLAWEEPFGPVLPFIRVSSVEEAIKISNESEFGLQGAVFTQDYPRAFAIAEQLEVGTVHINNKTQRGTDNFPFLGVKSSGAGTQGVKYSIEAMTRVKSTVFDIK

SEQ ID NO: 270 - protein, 479 aa, Bacillus thuringiensis
MTTSNTYKFYLNGEWRESSSGETIEIPSPYLHEVIGQVQAITRGEVDEAIASAKEAQKSWAEASLQDRAKYLYKWADELVNMQDEIADIIMKEVGKGYKDAKKEVVRTADFIRYTIEEALHMHGESMMGDSFPGGTKSKLAIIQRAPLGVVLAIAPFNYPVNLSAAKLAPALIMGNAVIFKPATQGAISGIKMVEALHKAGLPKGLVNVATGRGSVIGDYLVEHEGINMVSFTGGTNTGKHLAKKASMIPLVLELGGKDPGIVREDADLQDAANHIVSGAFSYSGQRCTAIKRVLVHENVADELVSLVKEQVAKLSVGSPEQDSTIVPLIDDKSADFVQGLVDDAVEKGATIVIGNKRERNLIYPTLIDHVTEEMKVAWEEPFGPILPIIRVSSDEQAIEIANKSEFGLQASVFTKDINKAFAIANKIETGSVQINGRTERGPDHFPFIGVKGSGMGAQGIRKSLESMTREKVTVLNLV

SEQ ID NO: 271 - protein, 496 aa, Arabidopsis thaliana
MAGTGLFAEILDGEVYKYYADGEWKTSSSGKSVAIMNPATRKTQYKVQACTQEEVNAVMELAKSAQKSWAKTPLWKRAELLHKAAAILKDNKAPMAESLVKEIAKPAKDSVTEVVRSGDLISYCAEEGVRILGEGKFLLSDSFPGNDRTKYCLTSKIPLGVVLAIPPFNYPVNLAVSKIAPALIAGNSLVLKPPTQGAVSCLHMVHCFHLAGFPKGLISCITGKGSEIGDFLTMHPAVNCISFTGGDTGISISKKAGMIPLQMELGGKDACIVLDDADLDLVASNIIKGGFSYSGQRCTAVKVVLVMESVADELVEKVKAKVAKLTVGPPEENSDITAVVSESSANFIEGLVMDAKEKGATFCQEYKREGNLIWPLLLDNVRPDMRIAWEEPFGPVVPVLRINSVEEGINHCNASNFGLQGCVFTKDINKAILISDAMETGTVQINSAPARGPDHFPFQGLKDSGIGSQGVTNSINLMTKVKTTVINLPTPSYSMG

SEQ ID NO: 272 - protein, 486 aa, Bacillus litoralis
MLASVSAIKVTDYKFYVNGQWKESQSGQTIDIRSPYLYEVMGRVQVITKEEVDEAIGFARGAQIEWAETPLQERAKYLYKWADELVNMQDEIAEIIMTEVGKGLKDAKNEVVRTADFIRYTVEEALHMHGESMKGDSFPGGSKSKIAMIERVPLGIVLAISPFNYPVNLSAAKLAPALIAGNAVIFKPATQGAISGIKMIEALHKAGFPKGLVNLITGRGSVIGDYLVEHKGIDMISFTGGTNTGVHLAKKAAMIPLVLELGGKDPGIVREDADLVEAAKQIISGAFSYSGQRCTAIKRVLVHESIADELVGILKGEIEKLAVGSPEEGNTVVPLIDDQSADFVQGLIDDAIERGATVVIGHKRERNLIYPTLLDHVTEDMSVAWEEPFGPVLPVIRISSDEEAIDIANKSEFGLQASVFTKDINKAFAIANKIETGSVQINGRTERGPDHFPFIGVKGSGMGAQGIRRSIESMTREKVTVLNLSL

SEQ ID NO: 273 - protein, 476 aa, Streptococcus hyointestinalis
MTKAYKNYVNGEWKLSEESIEIFAPATGESLGTVPAMTTAEVDEVYAKAKAAQPAWRALSYVERAAYLHKVADILVRDAEKIGAVLSKEIAKGYKSAVSEVIRTAEIINYAAEEGLRMEGEVLEGGSFEAASKNKIAIVRREPVGLVLAISPFNYPINLAGSKIAPALISGNVVALKPPTQGSISGLLLAEAFAEAGLPAGVFNTITGRGSVIGDYIVEHEAVNFINFTGSTPIGERIGKLAGMRPIMLELGGKDSAIVLEDADLDLTAKNIIAGAFGYSGQRCTAVKRVLVMDSVADELVEKIRQQVLDLTIGNPEDDADITPLIDKNAADFVEGLINDASDKGAEALTEIKREGNLICPVLFDKVTTDMRLAWEEPFGPVLPIIRVKSVEEAIEISNKSEYGLQASVFTNNFPLAFKIASQLEVGTVHINNKTQRGTDNFPFLGAKKSGAGVQGVKYSIEAMTSVKSVVFDIAK

SEQ ID NO: 274 - protein, 498 aa, Zea mays
MALAGTGVFAEILDGEVYRYYADGEWRTSASGKSVAIVNPTTRKTQYRVQACTQEEVNKAMDAAKVAQKAWARTPLWKRADVLHKAAAILKEHKAPIAECLVKEIAKPAKDAVSEVVRSGDLVSYTAEEGVRILGEGKLVVSDSFPGNERNKYCLSSKIPLGVVLAIPPFNYPANLAGSKIGPALIAGNALVLKPPTQGAVAALHMVHCFHLAGFPKGLISCVTGKGSEIGDFLTMHPGVNCISFTGGDTGIAISKKAGMVPLQMELGGKDACIVLEDADLDLVSANIVKGGFSYSGQRCTAVKVVLIMESIADAVVQKVNAKLAKLKVGPPEDDSDITPVVTESSANFIEGLVMDAKEKGATFCQEYRREGNLIWPLLLDHVRPDMRIAWEEPFGPVLPVIRINSVEEGIHHCNASNFGLQGCIFTRDINKAILISDAMETGTVQINSAPARGPDHFSFQGLKDSGIGSQGITNSINMMTKVKSTVINLPSPSYTMG

SEQ ID NO: 275 - protein, 476 aa, Lactobacillus delbrueckii
MTEHYLNYVNGEWRDSADAIEIFEPATGKSLGTVPAMSHEDVDYVMNSAKKALPAWRALSYVERAAYLQKAADILYRDAEKIGSTLSKEIAKGLKSSIGEVTRTAEIVEYTAKVGVTLDGEVMEGGNFEAASKNKLAVVRREPVGLVLAISPFNYPVNLAGSKIAPALMGGNVVAFKPPTQGSISGLLLAKAFAEAGLPAGVFNTITGRGRVIGDYIVEHPAVNFINFTGSSAVGKNIGKLAGMRPIMLELGGKDAAIVLEDADLDLTAKNIVAGAFGYSGQRCTAVKRVLVMDSVADELVEKVTALAKDLTVGIPEEDADITPLIDTKSADYVQGLIEEAAEKGAKPLFDFKREGNLIYPMVMDQVTTDMRLAWEEPFGPVLPFIRVKSADEAVMIANESEYGLQSSVFSRNFEKAFAIAGKLEVGTVHINNKTQRGPDNFPFLGVKSSGAGVQGVKYSIQAMTRVKSVVFNIED

SEQ ID NO: 276 - protein, 475 aa, Streptococcus pluranimalium
MSKQYKNLVNGEWKLSDNDIKIYAPATGEELGSVPAMSQEDVDYVYETARAAQPAWRALSYVERAAYLHKAADILVRDAEKIGAVLSKEVAKGYKAAVSEVIRTAEIVRYAAEEGVRMEGEVLEGGSFDAASKKKIAIVRREPLGLVLAISPFNYPVNLAGSKIAPALISGNVVALKPPTQGSISGLLLAEVFAEAGLPAGVFSTITGRGSVIGDYIVEHEAVNFINFTGSTPVGERIGKMAGMRPIMLELGGKDSAIVLKDADLEKAAKNIVDGAFGYSGQRCTAVKRVLVQEEVADELVEIIREKVLKLTIGNPEDNADITPLIDTGAADFVEGLINDAVEKGAEVKTEIKREGNLICPVLFDKVTTDMKLAWEEPFGPVLPVIRVKSVEEAIEISNQSEYGLQASVFTNDFPLAFSIAEQLEVGTVHINNKTQRGTDNFPFLGAKKSGAGVQGVKYSIEAMTSVKSVVFDIK

SEQ ID NO: 277 - protein, 496 aa, Nicotiana plumbaginifolia
MAGNGVFVDIIEGDVFKYYSEGEWKKSASGKSVAIINPTTRKTQYKVQACTQEEVNKVMEVAKTAQKSWAKTPLWKRAELLHKAAAILKEHKAPIAECLVKEIAKPAKDAVTEVVRSGDLVSYTAEEGVRILGEGKFLVSDSFPGNERTKYCLTSKIPLGVILAIPPFNYPVNLAVSKIAPALIAGNSLVLKPPTQGAVACLHMVHCFHLAGFPKGLISCVTGKGSEIGDFLTMHPGVHCISFTGGDTGVAISKKAGMIPLQMELGGKDACIVLEDADLDLAAGSIVKGGFSYSGQRCTAVKVVLVMESVADALVEKVNAKVAKLTVGPPEDDCDITPVVSESSANFIEGLVMDAKQKNATFCQQYKREGNLIWPLLLDNVRPDMRIAWEEPFGPVLPVIRINSVEEGIHHCNASNFGLQGCVFTKDINKAILISDAMETGTVQINSAPARGPDHFPFQGIKDSGIGSQGITNSINMMTKVKTTVINLPTPSYTMG

SEQ ID NO: 278 - protein, 475 aa, Streptococcus macacae
MTKQYKDYVNGEWKLSKNDIKIYEPASGAELGLVPAMSTEEVDYVYASAHKALKEWRALSYVERAAYLHKVADILERDAEKIGAVLSKEVAKGYKSAVSEVIRTAEIINYAAEEGLRMEGEVLEGGSFEAASKKKIAVVRREPVGLVLAISPFNYPVNLAGSKIAPALIAGNVVAFKPPTQGSISGLLLAEAFAEAGLPAGVFNTITGRGSEIGDYIVEHPAVNFINFTGSTPIGERIGRMAGMRPIMLELGGKDSAIVLEDADLELTAKNIVAGAFGYSGQRCTAVKRVLVMEGVADKLVEKIREKVLALTIGNPENDADITPLIDTKAADFVEGLINDAKEKGADNLTEIKREGNLICPVLFDKVTTDMRLAWEEPFGPVLPIIRVKSVEEAIAISNQSEYGLQASIFTNDFPRAFGIAEQLEVGTVHLNNKTQRGTDNFPFLGAKKSGAGIQGVKYSIEAMTTVKSVVFDIK

SEQ ID NO: 279 - protein, 475 aa, Streptococcus mutans
MTKQYKNYVNGEWKLSENEIKIYEPASGAELGSVPAMSTEEVDYVYASAKKAQPAWRSLSYIERAAYLHKVADILMRDKEKIGAVLSKEVAKGYKSAVSEVVRTAEIINYAAEEGLRMEGEVLEGGSFEAASKKKIAVVRREPVGLVLAISPFNYPVNLAGSKIAPALIAGNVIAFKPPTQGSISGLLLAEAFAEAGLPAGVFNTITGRGSEIGDYIVEHQAVNFINFTGSTGIGERIGKMAGMRPIMLELGGKDSAIVLEDADLELTAKNIIAGAFGYSGQRCTAVKRVLVMESVADELVEKIREKVLALTIGNPEDDADITPLIDTKSADYVEGLINDANDKGAAALTEIKREGNLICPILFDKVTTDMRLAWEEPFGPVLPIIRVTSVEEAIEISNKSEYGLQASIFTNDFPRAFGIAEQLEVGTVHINNKTQRGTDNFPFLGAKKSGAGIQGVKYSIEAMTTVKSVVFDIK

SEQ ID NO: 280 - protein, 479 aa, Bacillus cereus; identical to SEQ ID NO: 270

SEQ ID NO: 281 - protein, 319 aa, Aspergillus niger
MASPTVKLNSGYDMPLVGFGLWKVNNDTCADQIYHAIKEGYRLFDGACDYGNEVEAGQGIARAIKDGLVKREELFIVSKLWNSFHDGDRVEPICRKQLADWGIDYFDLYIVHFPISLKYVDPAVRYPPGWKSEKDELEFGNATIQETWTAMESLVDKKLARSIGISNFSAQLVMDLLRYARIRPATLQIEHHPYLTQTRLVEYAQKEGLTVTAYSSFGPLSFLELSVQNAVDSPPLFEHQLVKSIAEKHGRTPAQVLLRWATQRGIAVIPKSNNPQRLKQNLDVTGWNLEEEEIKAISGLDRGLRFNDPLGYGLYAPIF

SEQ ID NO: 282 - protein, 319 aa, Aspergillus oryzae
MAPPTVKLNSGFDMPLVGFGLWKVNNETCADQVYEAIKAGYRLFDGACDYGNEVECGQGVARAIKEGIVKREDLFIVSKLWNSFHEGDRVEPVCRKQLADWGVEYFDLYIVHFPVALKYVDPAVRYPPGWNSESGKIEFSNASIQETWTAMESLVDKKLARSIGVSNFSAQLLMDLLRYARVRPATLQIEHHPYLTQPRLVEYAQKEGIAVTAYSSFGPLSFLELEVKNAVNTTPLFEHNTIKSLAEKYGKTPAQVLLRWATQRGIAVIPKSNNPTRLALNLEVTGWDLEKTELEAISSLDQGLRFNDPLGYGMYVPIF

SEQ ID NO: 283 - protein, 324 aa, Magnaporthe oryzae
MASPTMKLNNGLDMPQVGFGLWKVENSVCADVVYNAIKAGYRLFDGACDYGNEVECGQGVKRAIDEGLVKREELFIVSKLWNTFHDGERVEPIVKKQLADWGIEYFDLYLIHFPVALEYVDPSVRYPPGWHYDDAGTEIRPSKASIQETWTAMEKLVDAGLSKAIGVSNFQAQLLYDMLRYARIRPATLQIEHHPYLVQQRLIEACKTEGIVVTAYSSFGPASFKEFNMEHAEALTPLLEEPTIVKLAEKYGKDPGQVLLRWATQRGLAVIPKSSREKTMKSNFEAVGWDMEDSDIKTISALDKGIRFNQPANYFSTDKLWIFG

SEQ ID NO: 284 - protein, 317 aa, Meyerozyma guilliermondii
MSITLNSGYEMPSVGFGCWKVDKATCADTIYNAIKVGYRLFDGAEDYGNEKEVGEGINRALDEGLVARDELFVVSKLWNSFHDPKNVEKALDRTLSDLKVDYLDLFLIHFPIAFKFVPFEEKYPPGFYCGDGDKFIYEGVPIIDTWRALEKMVEKGKIRSIGISNFPGALIQDLLRGAKIKPAVLQIEHHPYLQQPRLIEYVQSQGIAITAYSSFGPQSFVELNHPRVKDVKPLFEHDVIKSVAEKANKTPAQVLLRWATQRGLAVIPKSNNPDRLLSNLKVNDFDLSQEDFKEISKLDIELRFNNPWDWDKIPTFV

SEQ ID NO: 285 - protein, 318 aa, Scheffersomyces stipitis
MPSIKLNSGYDMPAVGFGCWKVDVDTCSEQIYRAIKTGYRLFDGAEDYANEKLVGAGVKKAIDEGIVKREDLFLTSKLWNNYHHPDNVEKALNRTLSDLQVDYVDLFLIHFPVTFKFVPLEEKYPPGFYCGKGDNFDYEDVPILETWKALEKLVKAGKIRSIGVSNFPGALLLDLLRGATIKPSVLQVEHHPYLQQPRLIEFAQSRGIAVTAYSSFGPQSFVELNQGRALNTSPLFENETIKAIAAKHGKSPAQVLLRWSSQRGIAIIPKSNTVPRLLENKDVNSFDLDEQDFADIAKLDINLRFNDPWDWDKIPIFV

SEQ ID NO: 286 - protein, 362 aa, Meyerozyma caribbica
MTPNPSLVLNKVNDITFETLEAPTLLEPNEVMVEVKKTGICGSDIHYYSHGKIGDFVLTQPMVLGHESAGVVTAVGPKVTSLKVGDRVAIEPGVPSRFSDEYKSGHYQLCPHIVFAATPDPKHGSPSPPGTLCKYYKSPEDFLVKLPDCVSLELGAMVEPLSVGVHGCRQAKVTFGDVVVVFGGGPVGLLAAAAATKFGAAKVMVVDVIDDKLKMALEVGVATHTFNSKSGGADDLVKELGERPDVVIECTGAEVCINLGIESLKMGGRFSQVGNATRPVSFPIVAFSSRELTLYGSFRYGYNDYKTSVAILEHNYRNGRENAAIDFEKLITHRFKFEDAKKAYDYIRDGNVAVKVIIDGPE

SEQ ID NO: 287 - protein, 377 aa, Trichoderma reesei
MSPSAVDDAPKATGAAISVKPNIGVFTNPKHDLWISEAEPSADAVKSGADLKPGEVTIAVRSTGICGSDVHFWHAGCIGPMIVEGDHILGHESAGEVIAVHPTVSSLQIGDRVAIEPNIICNACEPCLTGRYNGCEKVEFLSTPPVPGPLRRYVNHPAVWCHKIGNMSWENGALLEPLSVALAGMQRAKVQLGDPVLVCGAGPIGLVSMLCAAAAGACPLVITDISESRLAFAKEICPRVTTHRIEIGKSAEETAKSIVSSFGGVEPAVTLECTGVESSIAAAIWASKFGGKVFVIGVGKNEISIPFMRASVREVDIQLQYRYSNTWPRAIRLIESGVIDLSKFVTHRFPLEDAVKAFETSADPKSGAIKVMIQSLD

SEQ ID NO: 288 - protein, 365 aa, Meyerozyma guilliermondii
MATSLVSHSMTFTNPSLQVTKNHTLELNETAVNRPQPGQVLLHVRATGICGSDIHFWKTGAIGELKVLGNCTLGHEAAGEVIEVGENVTNVAAGDRVAIEPGVPCGNCFLCSQGDYNLCEQVQFIGVYPYHGSMQRFLVHDARYVHKLPDNMSYEKGALVEPASVAYHAIERAQLRLGGGVLVAGAGPIGLFTLLLAKASGCTPLCITDISQDRLDFAKKLVPELKTYRINPKLTPQETGLEIKKQFGPTEYHAPHVSLECTGVESSINCCAYATRRSGTLMVVGVGKDEIKIPFMTLSLAEVDVKFINRYHHSWAPVIKLISEGIIKVEPLVTHRFPLEQAKAALECSQDPTSGSIKVMIVDTE

SEQ ID NO: 289 - protein, 359 aa, Candida arabinofermentans
MVSLPKPTNPSLVVNEKHSIFMQDAPIVEPGANKVLVHVRACGICGSDVHFWKMGQIGELVVEGNCILGHEACGDVISVGENVTKVKVGDRVAVEPQLPCGKCYLCMDGNYNLCKEVEFSSVYPHNGLMQRYKVHDERFVHKIPDKMTYAQGALVEPVSVAYHGVERSQLTLGKAAMVAGAGPIGLCTLALAKASGATPLLITDISSKRLEFAKKLIPEVTTYQIDTKKSNWENAQEIRKLFGPTEYEQPPCVLECTGVESSIITGGFVTRRGGTLTVLGVGRGDINNFPFMHLSLAEIDVKFINRYHDSWPACINLIANKVINVDSLVTHRFPLEQAVQAMEVSSDPSNGNIKVMIED

SEQ ID NO: 290 - protein, 362 aa, Candida carpophila
MTPNPSLVLNKVNDITFETLEAPTLLEPNEVMVEVKKTGICGSDIHYYTHGKIGDFVLTQPMVLGHESAGVVTAVGSAVKSLKVGDRVAIEPGIPSRFSEEYKSGRYQLCPHIVFAATPDPGHGSPSPPGTLCKYYKSPEDFLVKLPDCVSLELGAMVEPLSVGVHGCKQAKVTFGDVVVVFGGGPVGLLAAAAATKFGAAKVMVVDVIDDKLKMALEVGVATHTFNSKLGGADELIKALGERPDVVVECTGAEVCINLGIESLKMGGRFSQVGNSIRPVNFPIVAFSSRELTLYGSFRYGYNDYKTSVAILEHNYRNGRENAAIDFEKLITHRFKFEDAKKAYDYIRDGNVAVKVIIDGPE

SEQ ID NO: 291 - protein, 388 aa, Talaromyces emersonii
MAAGISLTKPNIGVYTNPNHDLWVADAKPTLEEVKSGSDLKPGQVTVEIRSTGICGSDVHFWHAGCIGPMIVTGDHILGHESAGVVIAVAPDVKTLKPGDRVAIEPNIICNKCEPCLTGRYNGCEAVEFLSTPPVDGLLRRYVNHPAIWCHKIGDMSFEDGALLEPLSVALAGMDRAGVRLGDPVLVAGAGPIGLVTLLCVRAAGATPIVITDIDEGRLRFAKELVPEVRTYRVQTGLSAEENAAGILDALNDGNGSAPDAIRPRVAMECTGVESSVASAIWSVKFGGKVFVIGVGKNEMKVPFMRLSTWEIDLQYQYRYCNTWPKAIRLVKNGVINLKKLVTHRFPLEDAVKAFETAANPKTGAIKVQIMSSEEDIKAASGVNGASN

SEQ ID NO: 292 - protein, 382 aa, Aspergillus oryzae
MATATVLEKANIGVYTNTNHDLWVAESKPTLEEVKSGESLKPGEVTVQVRSTGICGSDVHFWHAGCIGPMIVTGDHILGHESAGEVIAVASDVTHLKPGDRVAVEPNIPCHACEPCLTGRYNGCEKVLFLSTPPVDGLLRRYVNHPAVWCHKIGDMSYEDGALLEPLSVSLAAIERSGLRLGDPVLVTGAGPIGLITLLSARAAGATPIVITDIDEGRLAFAKSLVPDVITYKVQTNLSAEDNAAGIIDAFNDGQGSAPDALKPKLALECTGVESSVASAIWSVKFGGKVFVIGVGKNEMKIPFMRLSTQEIDLQYQYRYCNTWPRAIRLVRNGVISLKKLVTHRFLLEDALKAFETAADPKTGAIKVQIMSNEEDVKGASA

SEQ ID NO: 293 - protein, 363 aa, Neurospora crassa
MASSASKTNIGVFTNPQHDLWISEASPSLESVQKGEELKEGEVTVAVRSTGICGSDVHFWKHGCIGPMIVECDHVLGHESAGEVIAVHPSVKSIKVGDRVAIEPQVICNACEPCLTGRYNGCERVDFLSTPPVPGLLRRYVNHPAVWCHKIGNMSYENGAMLEPLSVALAGLQRAGVRLGDPVLICGAGPIGLITMLCAKAAGACPLVITDIDEGRLKFAKEICPEVVTHKVERLSAEESAKKIVESFGGIEPAVALECTGVESSIAAAIWAVKFGGKVFVIGVGKNEIQIPFMRASVREVDLQFQYRYCNTWPRAIRLVENGLVDLTRLVTHRFPLEDALKAFETASDPKTGAIKVQIQSLE

SEQ ID NO: 294 - protein, 377 aa, Trichoderma reesei
MSPSAVDDAPKATGAAISVKPNIGVFTNPKHDLWISEAEPSADAVKSGADLKPGEVTIAVRSTGICGSDVHFWHAGCIGPMIVEGDHILGHESAGEVIAVHPTVSSLQIGDRVAIEPNIICNACEPCLTGRYNGCEKVEFLSTPPVPGLLRRYVNHPAVWCHKIGNMSWENGALLEPLSVALAGMQRAKVQLGDPVLVCGAGPIGLVSMLCAAAAGACPLVITDISESRLAFAKEICPRVTTHRIEIGKSAEETAKSIVSSFGGVEPAVTLECTGVESSIAAAIWASKFGGKVFVIGVGKNEISIPFMRASVREVDIQLQYRYSNTWPRAIRLIESGVIDLSKFVTHRFPLEDAVKAFETSADPKSGAIKVMIQSLD

SEQ ID NO: 295 - protein, 386 aa, Aspergillus niger
MATATVLEKANIGVFTNTKHDLWVADAKPTLEEVKNGQGLQPGEVTIEVRSTGICGSDVHFWHAGCIGPMIVTGDHILGHESAGQVVAVAPDVTSLKPGDRVAVEPNIICNACEPCLTGRYNGCENVQFLSTPPVDGLLRRYVNHPAIWCHKIGDMSYEDGALLEPLSVSLAGIERSGLRLGDPCLVTGAGPIGLITLLSARAAGASPIVITDIDEGRLEFAKSLVPDVRTYKVQIGLSAEQNAEGIINVFNDGQGSGPGALRPRIAMECTGVESSVASAIWSVKFGGKVFVIGVGKNEMTVPFMRLSTWEIDLQYQYRYCNTWPRAIRLVRNGVIDLKKLVTHRFLLEDAIKAFETAANPKTGAIKVQIMSSEDDVKAASAGQKI

SEQ ID NO: 296 - protein, 385 aa, Penicillium rubens
MASATVTKTNIGVYTNPKHDLWIADSSPTAEDINAGKGLKAGEVTIEVRSTGICGSDVHFWHAGCIGPMIVTGDHVLGHESAGQVLAVAPDVTHLKVGDRVAVEPNVICNACEPCLTGRYNGCVNVAFLSTPPVDGLLRRYVNHPAVWCHKIGDMSYEDGAMLEPLSVTLAAIERSGLRLGDPLLITGAGPIGLISLLSARAAGACPIVITDIDEGRLAFAKSLVPEVRTYKVEIGKSAEECADGIINALNDGQGSGPDALRPKLALECTGVESSVNSAIWSVKFGGKVFVIGVGKNEMTIPFMRLSTQEIDLQYQYRYCNTWPRAIRLIQNGVIDLSKLVTHRYSLENALQAFETASNPKTGAIKVQIMSSEEDVKAATAGQKY

SEQ ID NO: 297 - protein, 298 aa, Aspergillus brasiliensis
MSRPLEGKLAIVTGGSRGIGEAIAHNLASKGCSLLLNYTSDSSRARTESLCTTLTTTHNITCIPVQADLSDPTPAITTILTAAKTHFTSPTTNTLTIDILINNAGVSKDRFLNDPSSGPIDPAYFNWHYTINVLAPLLLTQACAEYLPRTPAHSGRIINISSISSSLGFTGQSVYGGTKAALEAMTRTWARELADVATVNAVNPGPVVGDMYFATGEEFWKQMQGFQDNAPLSKLQDGEVEENGLTEEQGRLIREKMGGRRPAFTKEIAGVVGMLCTEDGAWCTGSVVCANGGLKFTT

SEQ ID NO: 298 - protein, 274 aa, Candida sorboxylosa
MAAVVPTFKLTNEVTILTGACGGLSHALLHSLLAYEAPVALFDRNMEALEATRQDMIKYCISELGIKAEDVPRMECYVCNIADAAEVEQACEKVYQDFGSYPLHLVNTAGYCENFPAEEYPASNAENLVKVNLLGSLYICQSFAKPLIKNNIKGGSIVMIGSMSGVIVNDPQPQIAYNMSKAGVIHMVKSLGVEWAKYGIRVNALSPGYIATPLTKNVINGNVDMYNRWISMIPMKRMSDPSEFSGTVLYLLSNSASSYTTGENIVVDGGYQCL

SEQ ID NO: 299 - protein, 271 aa, Brettanomyces anomalus
MANFPDFRLDGEVTVVTGACGGLSGAVIPGLLAYGSDIALLDMDEKNIQQSIEDFKKQAKEKLKLEKVPEMKGYVCDVSDAANVNQVFEKIHAEFGKYPLHLLNTAGYCENFPAEKYPAKNAARLISVNLLGSLYVAQAWARPLIENKVQGASAVMIGSMSGNIVNDPQPQICYNMSKAGVIHMVKTLAAEWSKYNIRINTLSPGYISGPLTAKVIQADPKMYDRWMSMVPMHRMAEPQEFAGTILYLLSNQASSYTTGANIIADGGYACW

SEQ ID NO: 300 - protein, 306 aa, Talaromyces leycettanus
MWSPTRASAATFARPLEGKFGIVTGGSRGIGEAIARNLAAKGCSLLLNFTSESSRARTEELCTSLASKHSIRCFSVQADLANAEEAVDKILAAAKQHFTSSEGKFRIDVLINNAGVSQDRFLNDPAKGPITPEYFNWHYNINVLAPLLLTQACAPFLPTDRSGRIVNISSVSSSIGFTGQSVYGGTKAALEAMTRTWARELADKATVNAVNPGPVIGDMYFKTGEDFWKQMQGFQDATPLSKMDEDDAGLQDLSEEQIRLIKEKMGGRRPAFTSEIAGVVGMLCTQDGAWCTGSVVCANGGMRMTV

SEQ ID NO: 301 - protein, 274 aa, Kuraishia capsulata
MDVVPSFRQDGKLTIITGGSGGLANPIAKALLANGSEIALIDMNLQRTQDAALEIADWGTEYFKQTGFSGVVPKVSAWVCDISDFSSVESCFAEIAESHGKLATNLVNTAGYCENFPAEDYPAANAEKLIKVNLLGSLYVAQALAKPLIKQGLTGSLVLIGSMSGSVVNNPQPQVAYNASKAGVIHMVKSLAAEWAKYNIRVNTLSPGYILTPLTKNVISGDVAMKNSWESQVPMKRLAEPKEFVGSILYLLSESGSSYTTGHDLIVDGGYTLW

SEQ ID NO: 302 - protein, 298 aa, Aspergillus aculeatus
MSGILAGKLAIITGGSRGIGEAIAHNLARKGCSLLLNYTSDSSRARTESLCTQLAREHSIRCVPVQADLSDPAPAIERILSVAKAEFSSSTQQQLTIDILINNAGVSKDRFLNDATKGAIDADYFNWHYTINVLAPLLLTQAIAPYLPRSPPRSGRIVNISSISSALGFTGQSVYGGTKAALEAMTRTWARELADVATVNAVNPGPVIGDMYFATGEAFWQQMQGFQDNTPGSKMVEDDPLVGQLTEEQKQLIKEKMGGRRPGFTAEVAGVVGMLCSEDAGWCTGSVVCANGGLRFTT

SEQ ID NO: 303 - protein, 274 aa, Pichia membranifaciens
MATGVPNFKLTNELTIITGACGGLSQALLHTLLAYEAPVALFDRNMEALKKTKEELVLFCTAELGVKADAVPQMECFACNIADAQEVEAACEAVYTAFGTYPLHLVNTAGYCENYPAEEYPAANAENLVKVNLLGSLYIAQSFARPLIKHGIRGGSIVMIGSMSGVIVNDPQPQIAYNMAKAGVIHMVKSLAAEWAKYNIRVNTLSPGYIATPLTKNVINGNADLYNRWMSMVPMKRMSDPSEFSGTVLYLLSNSASSYTTGENIVVDGGYQCW

SEQ ID NO: 304 - protein, 298 aa, Aspergillus niger
MSRSLEGKFAIITGGSRGIGEAIAHNLASKGCSLLLNYTSDSSRTRTESLCNTLSTTHKITCIPVQADLSDPAPAVNTIISAAKTHFTSPTTNTLTIDILINNAGVSKDRFLNDPSSGPIDPAYFNWHYTINVLAPLLLTQACAEYLPRKPAHSGRIINISSISSSLGFTGQSVYGGTKAALEAMTRTWARELADVATVNAVNPGPVVGDMYFATGEEFWKQMQGFQDNTPLSKLVDGEEAVEELLSEEQKRLIREKMGGRRPAFTREIAGVVGMLCTEDGAWCTGSVVCANGGLKFT

SEQ ID NO: 305 - protein, 266 aa, Trichoderma reesei LXR
MPQPVPTANRLLDLFSLKGKVVVVTGASGPRGMGIEAARGCAEMGADLAITYSSRKEGAEKNAEELTKEYGVKVKVYKVNQSDYNDVERFVNQVVSDFGKIDAFIANAGATANSGVVDGSASDWDHVIQVDLSGTAYCAKAVGAHFKKQGHGSLVITASMSGHVANYPQEQTSYNVAKAGCIHLARSLANEWRDFARVNSISPGYIDTGLSDFIDEKTQELWRSMIPMGRNGDAKELKGAYVYLVSDASSYTTGADIVIDGGYTTR

SEQ ID NO: 306 - protein, 272 aa, Ambrosiozyma monospora
MTDYIPTFRFDGHLTIVTGACGGLAEALIKGLLAYGSDIALLDIDQEKTAAKQAEYHKYATEELKLKEVPKMGSYACDISDSDTVHKVFAQVAKDFGKLPLHLVNTAGYCENFPCEDYPAKNAEKMVKVNLLGSLYVSQAFAKPLIKEGIKGASVVLIGSMSGAIVNDPQNQVVYNMSKAGVIHLAKTLACEWAKYNIRVNSLNPGYIYGPLTKNVINGNEELYNRWISGIPQQRMSEPKEYIGAVLYLLSESAASYTTGASLLVDGGFTSW

SEQ ID NO: 307 - protein, 274 aa, Candida arabinofermentans
MASIIPTFRLDGGLTVVTGASGGLADAIIKGLLAYGSEIALLDMNIERVKETQAELTKFCIEELKLKEDSIPKMAAFACDISDAEHVESVFHDIYVEFGKYPLYLVNTAGYCENFAAEDYPAKRAEKLVQVNLLGSLYVCQSFARPLIKNGIKGGSAVMIGSMSGEIVNDPQPQIAYNMAKAGVIHMVRTLGAEWSKYNIRVNTLSPGYILTPLTKNVINGNNEMYQRWLSMIPMNRMSEPKEFIGTVLYLLSNSASSYTTGTNVTVDGGYSLW

SEQ ID NO: 308 - protein, 274 aa, Ogataea parapolymorpha
MADIVPTFRLDNELTVVTGASGGLSNAIIKGLLAYGSELALLDMNLERTKETQAELFKFCVEELKIKEDLVPKMHSYVCDISDAEHVNEVFAQIYADFGKYPLHLVNTAGYCENFPAEQYPAKNAEKLLKVNLLGALYVAQAFAKPLIDNNIKGGSIVMIGSMSGEIVNDPQPQVAYNMSKAGVIHMVKSLAAEWAKYSIRVNTLSPGYILTPLTKNVINGNNEMYQRWLSLTPMGRLSEAKEFTGTVLYLLSNSASSYTTGANITVDGGFTCW

SEQ ID NO: 309 - protein, 364 aa, Scheffersomyces stipitis
MTANPSLVLNKIDDISFESYDAPEITEPTDVLVEVKKTGICGSDIHYYAHGKIGNFVLTKPMVLGHESSGIVTKVGAGVTSLKVGDKVAIEPGIPSRLSDAYKSGHYNLCPHMCFAATPNSTEGEPNPPGTLCKYFKSPEDFLVKLPEHVSLEMGALVEPLSVGVHASKLASVRFGDYVAVFGAGPVGLLAAAVAKTFGAKGVIVIDIFDNKLQMAKDIGAATHTFNSKTGGDAAALVKAFDGHEPTVVLECTGAEPCINQGVAILAQGGRFVQVGNAPGPVKFPITEFATKELTLFGSFRYGFNDYKTSVDIMDTNYKNGKENAPIDFEQLITHRFKFDDAIKAYDLVRAGSGAVKCIIDGPE

SEQ ID NO: 310 - protein, 623 aa, Scheffersomyces stipitis
MTTTPFDAPDKLFLGFDLSTQQLKIIVTDENLAALKTYNVEFDSINSSVQKGVIAINDEISKGAIISPVYMWLDALDHVFEDMKKDGFPFNKVVGISGSCQQHGSVYWSRTAEKVLSELDAESSLSSQMRSAFTFKHAPNWQDHSTGKELEEFERVIGADALADISGSRAHYRFTGLQIRKLSTRFKPEKYNRTARISLVSSFVASVLLGRITSIEEADACGMNLYDIEKREFNEELLAIAAGVHPELDGVEQDGEIYRAGINELKRKLGPVKPITYESEGDIASYFVTRYGFNPDCKIYSFTGDNLATIISLPLAPNDALISLGTSTTVLIITKNYAPSSQYHLFKHPTMPDHYMGMICYCNGSLAREKVRDEVNEKFNVEDKKSWDKFNEILDKSTDFNNKLGIYFPLGEIVPNAAAQIKRSVLNSKNEIVDVELGDKNWQPEDDVSSIVESQTLSCRLRTGPMLSKSGDSSASSSASPQPEGDGTDLHKVYQDLVKKFGDLYTDGKKQTFESLTARPNRCYYVGGASNNGSIIRKMGSILAPVNGNYKVDIPNACALGGAYKASWSYECEAKKEWIGYDQYINRLFEVSDEMNSFEVKDKWLEYANGVGMLAKMESELKH

SEQ ID NO: 311 - protein, 570 aa, Aspergillus niger
MQGPLYIGFDLSTQQLKGLVVNSDLKVVYVSKFDFDADSRGFPIKKGVLTNEAEHEVFAPVALWLQALDGVLEGLRKQGMDFSQIKGISGAGQQHGSVYWGENAEKLLKELDASKTLEEQLDGAFSHPFSPNWQDSSTQKECDEFDAALGGQSELAFATGSKAHHRFTGPQIMRFQRKYPDVYKKTSRISLVSSFIASLFLGHIAPMDISDVCGMNLWNIKKGAYDEKLLQLCAGSSGVDDLKRKLGDVPEDGGIHLGPIDRYYVERYGFSPDCTIIPATGDNPATILALPLRASDAMVSLGTSTTFLMSTPSYKPDPATHFFNHPTTAGLYMFMLCYKNGGLARELVRDAVNEKLGEKPSTSWANFDKVTLETPPMGQKADSDPMKLGLFFPRPEIVPNLRSGQWRFDYNPKDGSLQPSNGGWDEPFDEARAIVESQMLSLRLRSRGLTQSPGEGIPAQPRRVYLVGGGSKNKAIAKVAGEILGGSEGVYKLEIGDNACALGAAYKAVWAMERAEGQTFEDLIGKRWHEEEFIEKIADGYQPGVFERYGQAVEGFEKMELEVLRQEGKH
